(19) United States
(12) Patent Application Publication
(10) Pub. No.: US 2022/0162599 A1
(43) Pub. Date: May 26, 2022

(54) METHODS AND COMPOSITIONS FOR MODULATING SPLICING OF ALTERNATIVE INTRONS

(71) Applicant: Stoke Therapeutics, Inc., Bedford, MA (US)

(72) Inventor: Isabel Aznarez, Boston, MA (US)

(21) Appl. No.: 17/518,337

(22) Filed: Nov. 3, 2021

Related U.S. Application Data
(63) Continuation of application No. PCT/US2020/029953, filed on Apr. 24, 2020.
(60) Provisional application No. 62/839,572, filed on Apr. 26, 2019.

(51) Int. Cl. C12N 15/11; A61P 25/02; A61P 27/02; A61P 3/00; A61P 35/00; C12N 15/113; A61K 31/7088

(52) U.S. Cl. CPC C12N 15/111; A61P 25/02; A61P 27/02; A61K 31/7088; A61P 35/00; C12N 15/1138; A61P 3/00

(57) ABSTRACT

Provided herein are methods and compositions for modulating expression of a target protein or a target RNA by modulating splicing pre-mRNA and for treating diseases or conditions associated with expression level of the target protein or the target RNA.

### CROSS-REFERENCE

[0001] This application is a continuation of International Application No. PCT/US2020/029953, filed Apr. 24, 2020, which claims the benefit of U.S. Provisional Application No. 62/839,572, filed on Apr. 26, 2019, each of which is incorporated herein by reference in its entirety.

### SEQUENCE LISTING

[0002] The instant application contains a Sequence Listing which has been submitted electronically in ASCII format and is hereby incorporated by reference in its entirety. Said ASCII copy, created on Nov. 3, 2021, is named 47991_726_301_SL.txt and is 1,023,500 bytes in size.

### BACKGROUND OF THE INVENTION

[0003] Alternative splicing events of pre-mRNAs encoded by genes can lead to non-productive mRNA transcripts which in turn can lead to reduced protein expression. Therapeutic agents which can target the alternative splicing events of pre-mRNAs encoded by genes can increase the expression level of functional proteins in patients and/or inhibit aberrant protein expression. Such therapeutic agents can be used to treat a condition that would benefit from increase of protein expression or treat a disease caused by altered expression level of a protein, for example, a condition or a disease caused by protein deficiency. One such example is programmed death-ligand 1 (PD-L1, or CD274), a ligand of programmed cell death-1 (PD-1, CD279).

[0004] PD-1 (CD279) is a critical immunoregulatory checkpoint molecule that exerts profound effects on adaptive immune responses and, in particular, on T cell function (Keir et al., 2008, Ann. Rev. Immunol., 26: 677-704). Its ligands, PD-L1 (CD274) and, to a more limited extent, PD-L2, are expressed both on specialized immune cells and in tissues. PD-L1 and PD-L2 interact with PD-1 to send inhibitory signals to invading T cells, inducing immune regulation, anergy, regulatory phenotypes and control of ‘attack.’ Expression of PD-1 and PD-L1 are upregulated in an inflammatory milieu, for example, upon T cell activation in the case of PD-1, and exposure to inflammatory cytokines in the case of PD-L1 and constitute an endogenous ‘brake’ or checkpoint. PD-L1 is also upregulated in a broad group of tumors, where its presence suppresses anti-tumor T cell responses.

[0005] PD-1:PD-L1 interaction is a critical mediator of peripheral immune tolerance, the suppression of T cells that inappropriately attack self-tissues, and further, has been shown to modulate established autoimmunity in animal models. Models of inflammatory disease where PD-L1 has been shown to be important include the non-obese diabetic (NOD) model of autoimmune diabetes, the experimental autoimmune encephalomyelitis (EAE) model of multiple sclerosis, the collagen-induced arthritis model of rheumatoid arthritis, multiple models of inflammatory bowel disease (ulcerative colitis, Crohn's disease), models of transplantation and graft versus host disease, autoimmune uveitis and numerous other settings, suggesting a broad role for the PD-1:PD-L1 pathway in inflammatory diseases (See Keir, 2008; Gianchecchi, 2013 for reviews). In humans, genetic polymorphisms in PD-1 have been associated with systemic lupus erythematosus, type 1 diabetes, rheumatoid arthritis, Grave's disease, and multiple sclerosis (Okazaki & Honjo, International Immunology, 2007).

[0006] Certain studies suggest that ectopic or overexpression of PD-L1 can regulate and suppress pathogenic immune responses, including studies of NOD mice, EAE, contact hypersensitivity, and lupus nephritis.

### SUMMARY OF THE INVENTION

[0007] Described herein is a method of modulating expression of a target protein or a target RNA by cells having an alternative-intron-containing pre-mRNA (AIC pre-mRNA), the AIC pre-mRNA comprising a alternative-intron, a first portion of an exon flanking a 5′ splice site of the alternative-intron, a second portion of the exon flanking a 3′ splice site of the alternative-intron, the method comprising contacting the cells with a therapeutic agent that binds to a targeted region of the AIC pre-mRNA encoding the target protein or the target RNA, whereby splicing of the alternative-intron from the AIC pre-mRNA encoding the target protein or the target RNA is modulated, thereby modulating a level of processed mRNA encoding the target protein or the target RNA, and modulating the expression of the target protein or the target RNA in the cells.

[0008] Described herein is a method of treating a disease or a condition in a subject in need thereof by modulating expression of a target protein or a target RNA in a cell of the subject, comprising: contacting a cell of the subject with a therapeutic agent that modulates splicing of an alternative-intron from an alternative-intron-containing pre-mRNA (AIC pre-mRNA) encoding the target protein or the target RNA, wherein the AIC pre-mRNA comprises the alternative-intron, a first portion of an exon flanking a 5′ splice site of the alternative-intron, a second portion of the exon flanking a 3′ splice site of the alternative-intron, wherein the therapeutic agent binds to a targeted region of the AIC pre-mRNA encoding the target protein or the target RNA, whereby splicing of the alternative-intron from the AIC pre-mRNA encoding the target protein or the target RNA is modulated, thereby modulating a level of processed mRNA encoding the target protein or the target RNA, and modulating the expression of the target protein or the target RNA in the cell of the subject.

[0009] In some embodiments, modulating the expression of the target protein in the cell comprises increasing the expression of the target protein in the cell. In some embodiments, modulating the level of processed mRNA encoding the target protein comprises increasing the level of processed mRNA encoding the target protein. In some embodiments, inclusion of the alternative-intron from the AIC pre-mRNA encoding the target protein is increased. In some embodiments, modulating the level of processed mRNA encoding the target protein comprises modulating the level of processed mRNA that comprises the alternative-intron, the first portion of the exon and the second portion of the exon.

[0010] In some embodiments, the therapeutic agent is a small molecule. In some embodiments, the therapeutic agent is an antisense oligomer (ASO) complementary to the targeted region of the AIC pre-mRNA. In some embodiments, the therapeutic agent is at least 75%, at least 80%, at least 85%, at least 90%, at least 95%, at least 98%, at least 99%, or 100%, complementary to the targeted region of the AIC pre-mRNA encoding the target protein. In some embodiments, at least a portion of the targeted region of the AIC pre-mRNA is within an intron upstream of the first portion of the exon. In some embodiments, at least a portion of the targeted region of the AIC pre-mRNA is within an intron downstream of the second portion of the exon. In some embodiments, at least a portion of the targeted region of the AIC pre-mRNA is within the alternative-intron. In some embodiments, the target protein produced is a fully functional protein. In some embodiments, the target RNA produced is a functional RNA. In some embodiments, the target RNA produced is a fully functional RNA.

[0011] In some embodiments, the target protein is PD-L1 (CD274). In some embodiments, the targeted region of the AIC pre-mRNA to which the therapeutic agent binds is located within exon 4 of CD274. In some embodiments, the therapeutic agent binds to a targeted region of a CD274 (PD-L1) AIC pre-mRNA, wherein the targeted region is within a sequence selected from SEQ ID NOs: 68, 69, and 71-76. In some embodiments, the therapeutic agent modulates splicing of an alternative intron from an exon of the AIC pre-mRNA of CD274, wherein the exon comprises a sequence with at least 80%, 85%, 90%, 92%, 95%, 97%, 99% or 100% sequence identity to SEQ ID NO: 68. In some embodiments, the therapeutic agent modulates splicing of an alternative intron from an exon of the AIC pre-mRNA of CD274, wherein the AIC pre-mRNA comprises a sequence with at least 80%, 85%, 90%, 92%, 95%, 97%, 99% or 100% sequence identity to any one of SEQ ID NOs: 71-76.

[0012] In some embodiments, the target protein is Rho GTPase-activating protein 23 (ARHGAP23). In some embodiments, the targeted region of the AIC pre-mRNA to which the therapeutic agent binds is located within an exon of ARHGAP23. In some embodiments, the therapeutic agent binds to a targeted region of a ARHGAP23 AIC pre-mRNA, wherein the targeted region is within a sequence selected from SEQ ID NOs: 77 and 91. In some embodiments, the therapeutic agent modulates splicing of an alternative intron from the AIC pre-mRNA of ARHGAP23, wherein the alternative intron comprises a sequence with at least 80%, 85%, 90%, 92%, 95%, 97%, 99% or 100% sequence identity to SEQ ID NO: 77. In some embodiments, the therapeutic agent modulates splicing of an alternative intron from an exon of the AIC pre-mRNA of ARHGAP23, wherein the exon comprises a sequence with at least 80%, 85%, 90%, 92%, 95%, 97%, 99% or 100% sequence identity to SEQ ID NO: 91.

[0013] In some embodiments, the target protein is bromodomain containing 1 (BRD1). In some embodiments, the targeted region of the AIC pre-mRNA to which the therapeutic agent binds is located within an exon of BRD1. In some embodiments, the therapeutic agent binds to a targeted region of a BRD1 AIC pre-mRNA, wherein the targeted region is within a sequence selected from SEQ ID NOs: 78 and 92. In some embodiments, the therapeutic agent modulates splicing of an alternative intron from the AIC pre-mRNA of BRD1, wherein the alternative intron comprises a sequence with at least 80%, 85%, 90%, 92%, 95%, 97%, 99% or 100% sequence identity to SEQ ID NO: 78. In some embodiments, the therapeutic agent modulates splicing of an alternative intron from an exon of the AIC pre-mRNA of BRD1, wherein the exon comprises a sequence with at least 80%, 85%, 90%, 92%, 95%, 97%, 99% or 100% sequence identity to SEQ ID NO: 92.

[0014] In some embodiments, the target protein is Protocadherin-16 (DCHS1). In some embodiments, the targeted region of the AIC pre-mRNA to which the therapeutic agent binds is located within an exon of DCHS1. In some embodiments, the therapeutic agent binds to a targeted region of a DCHS1 AIC pre-mRNA, wherein the targeted region is within a sequence selected from SEQ ID NOs: 79 and 93. In some embodiments, the therapeutic agent modulates splicing of an alternative intron from the AIC pre-mRNA of DCHS1, wherein the alternative intron comprises a sequence with at least 80%, 85%, 90%, 92%, 95%, 97%, 99% or 100% sequence identity to SEQ ID NO: 79. In some embodiments, the therapeutic agent modulates splicing of an alternative intron from an exon of the AIC pre-mRNA of DCHS1, wherein the exon comprises a sequence with at least 80%, 85%, 90%, 92%, 95%, 97%, 99% or 100% sequence identity to SEQ ID NO: 93.

[0015] In some embodiments, the target protein is Erythrocyte Membrane Protein Band 4.1 Like 2 (EPB41L2). In some embodiments, the targeted region of the AIC pre-mRNA to which the therapeutic agent binds is located within an exon of EPB41L2. In some embodiments, the therapeutic agent binds to a targeted region of a EPB41L2 AIC pre-mRNA, wherein the targeted region is within a sequence selected from SEQ ID NOs: 80 and 94. In some embodiments, the therapeutic agent modulates splicing of an alternative intron from the AIC pre-mRNA of EPB41L2, wherein the alternative intron comprises a sequence with at least 80%, 85%, 90%, 92%, 95%, 97%, 99% or 100% sequence identity to SEQ ID NO: 80. In some embodiments, the therapeutic agent modulates splicing of an alternative intron from an exon of the AIC pre-mRNA of EPB41L2, wherein the exon comprises a sequence with at least 80%, 85%, 90%, 92%, 95%, 97%, 99% or 100% sequence identity to SEQ ID NO: 94.

[0016] In some embodiments, the target protein is Glutathione peroxidase 8 (GPX8). In some embodiments, the targeted region of the AIC pre-mRNA to which the therapeutic agent binds is located within an exon of GPX8. In some embodiments, the therapeutic agent binds to a targeted region of a GPX8 AIC pre-mRNA, wherein the targeted region is within a sequence selected from SEQ ID NOs: 81 and 95. In some embodiments, the therapeutic agent modulates splicing of an alternative intron from the AIC pre-mRNA of GPX8, wherein the alternative intron comprises a sequence with at least 80%, 85%, 90%, 92%, 95%, 97%, 99% or 100% sequence identity to SEQ ID NO: 81. In some embodiments, the therapeutic agent modulates splicing of an alternative intron from an exon of the AIC pre-mRNA of GPX8, wherein the exon comprises a sequence with at least 80%, 85%, 90%, 92%, 95%, 97%, 99% or 100% sequence identity to SEQ ID NO: 95.

[0017] In some embodiments, the target protein is Human immunodeficiency virus type I enhancer-binding protein 3 (HIVEP3). In some embodiments, the targeted region of the AIC pre-mRNA to which the therapeutic agent binds is located within an exon of HIVEP3. In some embodiments, the therapeutic agent binds to a targeted region of a HIVEP3 AIC pre-mRNA, wherein the targeted region is within a sequence selected from SEQ ID NOs: 82 and 96. In some embodiments, the therapeutic agent modulates splicing of an alternative intron from the AIC pre-mRNA of HIVEP3, wherein the alternative intron comprises a sequence with at least 80%, 85%, 90%, 92%, 95%, 97%, 99% or 100% sequence identity to SEQ ID NO: 82. In some embodiments, the therapeutic agent modulates splicing of an alternative intron from an exon of the AIC pre-mRNA of HIVEP3, wherein the exon comprises a sequence with at least 80%, 85%, 90%, 92%, 95%, 97%, 99% or 100% sequence identity to SEQ ID NO: 96.

[0018] In some embodiments, the target protein is Inversin (INVS). In some embodiments, the targeted region of the AIC pre-mRNA to which the therapeutic agent binds is located within an exon of INVS. In some embodiments, the therapeutic agent binds to a targeted region of an INVS AIC pre-mRNA, wherein the targeted region is within a sequence selected from SEQ ID NOs: 83 and 97. In some embodiments, the therapeutic agent modulates splicing of an alternative intron from the AIC pre-mRNA of INVS, wherein the alternative intron comprises a sequence with at least 80%, 85%, 90%, 92%, 95%, 97%, 99% or 100% sequence identity to SEQ ID NO: 83. In some embodiments, the therapeutic agent modulates splicing of an alternative intron from an exon of the AIC pre-mRNA of INVS, wherein the exon comprises a sequence with at least 80%, 85%, 90%, 92%, 95%, 97%, 99% or 100% sequence identity to SEQ ID NO: 97.

[0019] In some embodiments, the target protein is Dyslexia-associated protein KIAA0319 (KIAA0319). In some embodiments, the targeted region of the AIC pre-mRNA to which the therapeutic agent binds is located within an exon of KIAA0319. In some embodiments, the therapeutic agent binds to a targeted region of a KIAA0319 AIC pre-mRNA, wherein the targeted region is within a sequence selected from SEQ ID NOs: 84 and 98. In some embodiments, the therapeutic agent modulates splicing of an alternative intron from the AIC pre-mRNA of KIAA0319, wherein the alternative intron comprises a sequence with at least 80%, 85%, 90%, 92%, 95%, 97%, 99% or 100% sequence identity to SEQ ID NO: 84. In some embodiments, the therapeutic agent modulates splicing of an alternative intron from an exon of the AIC pre-mRNA of KIAA0319, wherein the exon comprises a sequence with at least 80%, 85%, 90%, 92%, 95%, 97%, 99% or 100% sequence identity to SEQ ID NO: 98.

[0020] In some embodiments, the target protein is NLR Family Apoptosis Inhibitory Protein (NAIP). In some embodiments, the targeted region of the AIC pre-mRNA to which the therapeutic agent binds is located within an exon of NAIP. In some embodiments, the therapeutic agent binds to a targeted region of a NAIP AIC pre-mRNA, wherein the targeted region is within a sequence selected from SEQ ID NOs: 85 and 99. In some embodiments, the therapeutic agent modulates splicing of an alternative intron from the AIC pre-mRNA of NAIP, wherein the alternative intron comprises a sequence with at least 80%, 85%, 90%, 92%, 95%, 97%, 99% or 100% sequence identity to SEQ ID NO: 85. In some embodiments, the therapeutic agent modulates splicing of an alternative intron from an exon of the AIC pre-mRNA of NAIP, wherein the exon comprises a sequence with at least 80%, 85%, 90%, 92%, 95%, 97%, 99% or 100% sequence identity to SEQ ID NO: 99.

[0021] In some embodiments, the target protein is Patched 2 (PTCH2). In some embodiments, the targeted region of the AIC pre-mRNA to which the therapeutic agent binds is located within an exon of PTCH2. In some embodiments, the therapeutic agent binds to a targeted region of a PTCH2 AIC pre-mRNA, wherein the targeted region is within a sequence selected from SEQ ID NOs: 86 and 100. In some embodiments, the therapeutic agent modulates splicing of an alternative intron from the AIC pre-mRNA of PTCH2, wherein the alternative intron comprises a sequence with at least 80%, 85%, 90%, 92%, 95%, 97%, 99% or 100% ho sequence identity to SEQ ID NO: 86. In some embodiments, the therapeutic agent modulates splicing of an alternative intron from an exon of the AIC pre-mRNA of PTCH2, wherein the exon comprises a sequence with at least 80%, 85%, 90%, 92%, 95%, 97%, 99% or 100% sequence identity to SEQ ID NO: 100.

[0022] In some embodiments, the target protein is Protein Tyrosine Phosphatase Receptor Type Z1 (PTPRZ1). In some embodiments, the targeted region of the AIC pre-mRNA to which the therapeutic agent binds is located within an exon of PTPRZ1. In some embodiments, the therapeutic agent binds to a targeted region of a PTPRZ1 AIC pre-mRNA, wherein the targeted region is within a sequence selected from SEQ ID NOs: 87 and 101. In some embodiments, the therapeutic agent modulates splicing of an alternative intron from the AIC pre-mRNA of PTPRZ1, wherein the alternative intron comprises a sequence with at least 80%, 85%, 90%, 92%, 95%, 97%, 99% or 100% sequence identity to SEQ ID NO: 87. In some embodiments, the therapeutic agent modulates splicing of an alternative intron from an exon of the AIC pre-mRNA of PTPRZ1, wherein the exon comprises a sequence with at least 80%, 85%, 90%, 92%, 95%, 97%, 99% or 100% sequence identity to SEQ ID NO: 101.

[0023] In some embodiments, the target protein is SON. In some embodiments, the targeted region of the AIC pre-mRNA to which the therapeutic agent binds is located within an exon of SON. In some embodiments, the therapeutic agent binds to a targeted region of a SON AIC pre-mRNA, wherein the targeted region is within a sequence selected from SEQ ID NOs: 88, 89, 102 and 103. In some embodiments, the therapeutic agent modulates splicing of an alternative intron from the AIC pre-mRNA of SON, wherein the alternative intron comprises a sequence with at least 80%, 85%, 90%, 92%, 95%, 97%, 99% or 100% sequence identity to SEQ ID NO: 88 or SEQ ID NO: 89. In some embodiments, the therapeutic agent modulates splicing of an alternative intron from an exon of the AIC pre-mRNA of SON, wherein the exon comprises a sequence with at least 80%, 85%, 90%, 92%, 95%, 97%, 99% or 100% sequence identity to SEQ ID NO: 102 or SEQ ID NO: 103.

[0024] In some embodiments, the target protein is Zinc finger CCHC domain-containing protein 2 (ZCCHC2). In some embodiments, the targeted region of the AIC pre-mRNA to which the therapeutic agent binds is located within an exon of ZCCHC2. In some embodiments, the therapeutic agent binds to a targeted region of a ZCCHC2 AIC pre-mRNA, wherein the targeted region is within a sequence selected from SEQ ID NOs: 90 and 104. In some embodiments, the therapeutic agent modulates splicing of an alternative intron from the AIC pre-mRNA of ZCCHC2, wherein the alternative intron comprises a sequence with at least 80%, 85%, 90%, 92%, 95%, 97%, 99% or 100% sequence identity to SEQ ID NO: 90. In some embodiments, the therapeutic agent modulates splicing of an alternative intron from an exon of the AIC pre-mRNA of ZCCHC2, wherein the exon comprises a sequence with at least 80%, 85%, 90%, 92%, 95%, 97%, 99% or 100% sequence identity to SEQ ID NO: 104.

[0025] In some embodiments, the disease or the condition is an immune disease or an immune disorder. In some embodiments, the immune disease or the immune disorder is an autoimmune disease or an autoimmune disorder, an inflammatory disease or an inflammatory disorder, a chronic infection, graft-versus-host disease (GVHD), a transplant rejection, or a T cell proliferative disorder. In some embodiments, the immune disease or the immune disorder is an autoimmune disease or an autoimmune disorder or an inflammatory disease or an inflammatory disorder selected from: multiple sclerosis, inflammatory bowel disease, autoimmune hepatitis, kidney inflammation, rheumatoid arthritis, psoriasis, lupus nephritis, corneal transplant, and uveitis.

[0026] In some embodiments, the disease or the condition is caused by a deficient amount or activity of the target protein. In some embodiment, the disease or the condition is treated or prevented by an increase in the amount or activity of the target protein. In some embodiments, the disease or the condition is induced by a loss-of-function mutation in the target protein.

[0027] In some embodiments, the therapeutic agent increases the level of processed mRNA encoding the target protein in the cell. In some embodiments, the level of processed mRNA encoding the target protein in the cell contacted with the therapeutic agent is increased about 1.1 to about 10-fold, about 1.5 to about 10-fold, about 2 to about 10-fold, about 3 to about 10-fold, about 4 to about 10-fold, about 1.1 to about 5-fold, about 1.1 to about 6-fold, about 1.1 to about 7-fold, about 1.1 to about 8-fold, about 1.1 to about 9-fold, about 2 to about 5-fold, about 2 to about 6-fold, about 2 to about 7-fold, about 2 to about 8-fold, about 2 to about 9-fold, about 3 to about 6-fold, about 3 to about 7-fold, about 3 to about 8-fold, about 3 to about 9-fold, about 4 to about 7-fold, about 4 to about 8-fold, about 4 to about 9-fold, at least about 1.1-fold, at least about 1.5-fold, at least about 2-fold, at least about 2.5-fold, at least about 3-fold, at least about 3.5-fold, at least about 4-fold, at least about 5-fold, or at least about 10-fold, compared to the level of processed mRNA encoding the target protein in a control cell.

[0028] In some embodiments, the therapeutic agent increases the expression of the target protein in the cell. In some embodiments, the level of the target protein in the cell contacted with the therapeutic agent is increased about 1.1 to about 10-fold, about 1.5 to about 10-fold, about 2 to about 10-fold, about 3 to about 10-fold, about 4 to about 10-fold, about 1.1 to about 5-fold, about 1.1 to about 6-fold, about 1.1 to about 7-fold, about 1.1 to about 8-fold, about 1.1 to about 9-fold, about 2 to about 5-fold, about 2 to about 6-fold, about 2 to about 7-fold, about 2 to about 8-fold, about 2 to about 9-fold, about 3 to about 6-fold, about 3 to about 7-fold, about 3 to about 8-fold, about 3 to about 9-fold, about 4 to about 7-fold, about 4 to about 8-fold, about 4 to about 9-fold, at least about 1.1-fold, at least about 1.5-fold, at least about 2-fold, at least about 2.5-fold, at least about 3-fold, at least about 3.5-fold, at least about 4-fold, at least about 5-fold, or at least about 10-fold, compared to the level of the target protein in a control cell.

[0029] In some embodiments, inclusion of the alternative-intron from the AIC pre-mRNA encoding the target protein is decreased. In some embodiments, the therapeutic agent decreases the level of processed mRNA encoding the target protein in the cell. In some embodiments, the level of processed mRNA encoding the target protein in the cell contacted with the therapeutic agent is decreased about 1.1 to about 10-fold, about 1.5 to about 10-fold, about 2 to about 10-fold, about 3 to about 10-fold, about 4 to about 10-fold, about 1.1 to about 5-fold, about 1.1 to about 6-fold, about 1.1 to about 7-fold, about 1.1 to about 8-fold, about 1.1 to about 9-fold, about 2 to about 5-fold, about 2 to about 6-fold, about 2 to about 7-fold, about 2 to about 8-fold, about 2 to about 9-fold, about 3 to about 6-fold, about 3 to about 7-fold, about 3 to about 8-fold, about 3 to about 9-fold, about 4 to about 7-fold, about 4 to about 8-fold, about 4 to about 9-fold, at least about 1.1-fold, at least about 1.5-fold, at least about 2-fold, at least about 2.5-fold, at least about 3-fold, at least about 3.5-fold, at least about 4-fold, at least about 5-fold, or at least about 10-fold, compared to the level of processed mRNA encoding the target protein in a control cell.

[0030] In some embodiments, the therapeutic agent decreases the expression of the target protein in the cell. In some embodiments, the level of the target protein in the cell contacted with the therapeutic agent is decreased about 1.1 to about 10-fold, about 1.5 to about 10-fold, about 2 to about 10-fold, about 3 to about 10-fold, about 4 to about 10-fold, about 1.1 to about 5-fold, about 1.1 to about 6-fold, about 1.1 to about 7-fold, about 1.1 to about 8-fold, about 1.1 to about 9-fold, about 2 to about 5-fold, about 2 to about 6-fold, about 2 to about 7-fold, about 2 to about 8-fold, about 2 to about 9-fold, about 3 to about 6-fold, about 3 to about 7-fold, about 3 to about 8-fold, about 3 to about 9-fold, about 4 to about 7-fold, about 4 to about 8-fold, about 4 to about 9-fold, at least about 1.1-fold, at least about 1.5-fold, at least about 2-fold, at least about 2.5-fold, at least about 3-fold, at least about 3.5-fold, at least about 4-fold, at least about 5-fold, or at least about 10-fold, compared to the level of the target protein in a control cell.

[0031] In some embodiments, the therapeutic agent comprises a backbone modification comprising a phosphorothioate linkage or a phosphorodiamidate linkage. In some embodiments, the therapeutic agent comprises a phosphorodiamidate morpholino, a locked nucleic acid, a peptide nucleic acid, a 2′-O-methyl, a 2′-Fluoro, or a 2′-O-methoxyethyl moiety. In some embodiments, the therapeutic agent comprises at least one modified sugar moiety. In some embodiments, each sugar moiety is a modified sugar moiety. In some embodiments, the therapeutic agent consists of from 8 to 50 nucleobases, 8 to 40 nucleobases, 8 to 35 nucleobases, 8 to 30 nucleobases, 8 to 25 nucleobases, 8 to 20 nucleobases, 8 to 15 nucleobases, 9 to 50 nucleobases, 9 to 40 nucleobases, 9 to 35 nucleobases, 9 to 30 nucleobases, 9 to 25 nucleobases, 9 to 20 nucleobases, 9 to 15 nucleobases, 10 to 50 nucleobases, 10 to 40 nucleobases, 10 to 35 nucleobases, 10 to 30 nucleobases, 10 to 25 nucleobases, 10 to 20 nucleobases, 10 to 15 nucleobases, 11 to 50 nucleobases, 11 to 40 nucleobases, 11 to 35 nucleobases, 11 to 30 nucleobases, 11 to 25 nucleobases, 11 to 20 nucleobases, 11 to 15 nucleobases, 12 to 50 nucleobases, 12 to 40 nucleobases, 12 to 35 nucleobases, 12 to 30 nucleobases, 12 to 25 nucleobases, 12 to 20 nucleobases, or 12 to 15 nucleobases.

[0032] In some embodiments, the method further comprises assessing mRNA level or expression level of the target protein. In some embodiments, the subject is a human. In some embodiments, the subject is a non-human animal. In some embodiments, the subject is a fetus, an embryo, or a child. In some embodiments, the cell or the cells is ex vivo, or in a tissue, or an organ ex vivo.

[0033] In some embodiments, the therapeutic agent is administered to the subject by intracerebroventricular injection, intraperitoneal injection, intramuscular injection, intrathecal injection, subcutaneous injection, oral administration, synovial injection, intravitreal administration, subretinal injection, topical application, implantation, or intravenous injection.

[0034] In some embodiments, the splicing of the alternative-intron from the AIC pre-mRNA encoding the target protein or the target RNA produces a processed mRNA with a premature termination codon (PTC). In some embodiments, the splicing of the alternative-intron from the AIC pre-mRNA encoding the target protein or the target RNA produces a processed mRNA with a premature termination codon (PTC) that does not encode a functional target protein or does not encode a functional RNA. In some embodiments, the splicing of the alternative-intron from the AIC pre-mRNA encoding the target protein or the target RNA produces a processed mRNA with a premature termination codon (PTC) that encodes a non-functional target protein or a non-functional target RNA. In some embodiments, the splicing of the alternative-intron from the AIC pre-mRNA encoding the target protein or the target RNA produces a processed mRNA that has a lower translation or expression efficiency for producing the target protein as compared to a corresponding processed mRNA that is otherwise identical but comprises the alternative-intron. In some embodiments, the splicing of the alternative-intron from the AIC pre-mRNA encoding the target protein or the target RNA produces a processed mRNA that undergoes non-sense mediated decay (NMD). In some embodiments, the splicing of the alternative-intron from the AIC pre-mRNA encoding the target protein or the target RNA produces a processed mRNA that undergoes non-sense mediated decay (NMD).

[0035] Provided herein is a therapeutic agent for use in methods described herein. Provided herein is a pharmaceutical composition comprising the therapeutic agent described herein and a pharmaceutically acceptable excipient.

[0036] Provided herein is a method of treating a subject in need thereof, comprising administering the pharmaceutical composition of claim 48 by intracerebroventricular injection, intraperitoneal injection, intramuscular injection, intrathecal injection, subcutaneous injection, oral administration, synovial injection, intravitreal administration, subretinal injection, topical application, implantation, or intravenous injection to the subject.

[0037] Provided herein is a composition comprising a therapeutic agent for use in a method of modulating expression of a target protein or a target RNA by cells to treat a disease or a condition in a subject in need thereof, associated with an aberrant protein or an aberrant RNA in the subject, wherein the aberrant protein or aberrant RNA is aberrant in amount or activity in the subject, wherein the therapeutic agent modulates splicing of an alternative-intron-containing pre-mRNA (AIC pre-mRNA) encoding the target protein or the target RNA, wherein the target protein is: (a) the aberrant protein; (b) a protein which functionally activates or deactivates cellular signaling mechanisms to alter cellular activity associated with the disease or condition (c) a protein which functionally augments or replaces the aberrant protein in the subject; or (d) a protein which functionally decreases or inhibits the aberrant protein in the subject; and wherein the target RNA is: (a) the aberrant RNA; (b) an RNA which functionally activates or deactivates cellular signaling mechanisms to alter cellular activity associated with the disease or condition; (c) an RNA which functionally augments or replaces the aberrant RNA in the subject; or (d) an RNA which functionally decreases or inhibits the aberrant RNA in the subject; wherein the AIC pre-mRNA comprising an alternative-intron, a first portion of an exon flanking a 5′ splice site of the alternative-intron, a second portion of the exon flanking a 3′ splice site of the alternative-intron, and whereby splicing of the alternative-intron from the AIC pre-mRNA encoding the target protein or the target RNA is modulated, thereby modulating production or activity of the target protein or the target RNA in the subject.

### INCORPORATION BY REFERENCE

[0038] All publications, patents, and patent applications mentioned in this specification are herein incorporated by reference to the same extent as if each individual publication, patent, or patent application was specifically and individually indicated to be incorporated by reference.

### BRIEF DESCRIPTION OF THE DRAWINGS

[0039] The novel features of the invention are set forth with particularity in the appended claims. A better understanding of the features and advantages of the present invention will be obtained by reference to the following detailed description that sets forth illustrative embodiments, in which the principles of the invention are utilized, and the accompanying drawings.

[0040] FIG. 1 shows a schematic of the generation of different splice variants

[0041] FIGS. 2A-C show measurements of different mRNA isoforms in different cells and conditions

[0042] FIG. 3 shows a schematic of an ASO walk.

[0043] FIGS. 4A-C show measurements of mRNA isoforms and protein expression in cells transfected with different ASOs.

[0044] FIGS. 5A-D show measurements of ASO efficacy.

[0045] FIGS. 6A-C show measurements of ASO efficacy.

### SEQUENCES

[0046] This application includes nucleotide sequences SEQ ID NO: 1-3651, listed in Tables 1-3. The nucleotide sequences set forth as SEQ ID NOS 1-67 in Table 1 are examples of antisense oligomers (ASOs) useful in the methods described herein. The nucleotide sequences set forth as SEQ ID NOs: 68 in Table 2 are examples of sequences that can be targeted by ASOs by the methods described herein. The nucleotide sequence set forth in Table 2 as SEQ ID NO: 69 is a CD274 mRNA sequence. The nucleotide sequence set forth in Table 2 as SEQ ID NO: 70 is a CD274 amino acid sequence. The nucleotide sequence set forth in Table 2 as SEQ ID NO: 71 is CD274 genomic sequence. Table 2 as SEQ ID NOs: 72-76 are pre-mRNA sequences. The nucleotide sequences set forth as SEQ ID NOs: 77-90 in Table 2 are alternative introns to be targeted in genes listed in the table. The nucleotide sequences set forth as SEQ ID NOs: 91-104 in Table 2 are exons to be targeted in genes listed in the table. The nucleotide sequences set forth as SEQ ID NOS 105-3651 in Table 2 are examples of antisense oligomers (ASOs) useful in the methods described herein. Upper case letters represent exon sequence and lower-case letters represent intron sequence.

### DETAILED DESCRIPTION OF THE INVENTION

### Splicing and Alternative Splice Sites

[0047] Intervening sequences or introns are removed by a large and highly dynamic RNA-protein complex termed the spliceosome, which orchestrates complex interactions between primary transcripts, small nuclear RNAs (snRNAs), and a large number of proteins. Spliceosomes assemble ad hoc on each intron in an ordered manner, starting with recognition of the 5′ splice site (5′ss) by U1 snRNA or the 3′splice site (3′ss) by the U2 pathway, which involves binding of the U2 auxiliary factor (U2AF) to the 3′ss region to facilitate U2 binding to the branch point sequence (BPS). U2AF is a stable heterodimer composed of a U2AF2-encoded 65-kD subunit (U2AF65), which binds the polypyrimidine tract (PPT), and a U2AF1-encoded 35-kD subunit (U2AF35), which interacts with highly conserved AG dinucleotides at 3′ss and stabilizes U2AF65 binding. In addition to the BPS/PPT unit and 3′ss/5′ss, accurate splicing requires auxiliary sequences or structures that activate or repress splice site recognition, known as intronic or exonic splicing enhancers or silencers. These elements allow genuine splice sites to be recognized among a vast excess of cryptic or pseudo-sites in the genome of higher eukaryotes, which have the same sequences but outnumber authentic sites by an order of magnitude.

[0048] The decision of whether to splice or not to splice can be typically modeled as a stochastic rather than deterministic process, such that even the most defined splicing signals can sometimes splice incorrectly. However, under normal conditions, pre-mRNA splicing proceeds at surprisingly high fidelity. This is attributed in part to the activity of adjacent cis-acting auxiliary exonic and intronic splicing regulatory elements (ESRs or ISRs). Typically, these functional elements are classified as either exonic or intronic splicing enhancers (ESEs or ISEs) or silencers (ESSs or ISSs) based on their ability to stimulate or inhibit splicing, respectively. Although there is now evidence that some auxiliary cis-acting elements may act by influencing the kinetics of spliceosome assembly, such as the arrangement of the complex between U1 snRNP and the 5′ss, it seems very likely that many elements function in concert with trans-acting RNA-binding proteins (RBPs). For example, the serine- and arginine-rich family of RBPs (SR proteins) is a conserved family of proteins that have a key role in defining exons. SR proteins promote exon recognition by recruiting components of the pre-spliceosome to adjacent splice sites or by antagonizing the effects of ESSs in the vicinity. The repressive effects of ESSs can be mediated by members of the heterogeneous nuclear ribonucleoprotein (hnRNP) family and can alter recruitment of core splicing factors to adjacent splice sites. In addition to their roles in splicing regulation, silencer elements are suggested to have a role in repression of pseudo-exons, sets of decoy intronic splice sites with the typical spacing of an exon but without a functional open reading frame. ESEs and ESSs, in cooperation with their cognate trans-acting RBPs, represent important components in a set of splicing controls that specify how, where, and when mRNAs are assembled from their precursors.

[0049] The sequences marking the exon-intron boundaries are degenerate signals of varying strengths that can occur at high frequency within human genes. In multi-exon genes, different pairs of splice sites can be linked together in many different combinations, creating a diverse array of transcripts from a single gene. This is commonly referred to as alternative pre-mRNA splicing. Although most mRNA isoforms produced by alternative splicing can be exported from the nucleus and translated into functional polypeptides, different mRNA isoforms from a single gene can vary greatly in their translation efficiency. Those mRNA isoforms with premature termination codons (PTCs) at least 50 bp upstream of an exon junction complex are likely to be targeted for degradation by the nonsense-mediated mRNA decay (NMD) pathway. Mutations in traditional (BPS/PPT/3′ss/5′ss) and auxiliary splicing motifs can cause aberrant splicing, such as exon skipping or cryptic (or pseudo-) exon inclusion or splice-site activation and contribute significantly to human morbidity and mortality. Both aberrant and alternative splicing patterns can be influenced by natural DNA variants in exons and introns.

[0050] Cryptic (or pseudo-) splice sites have the same splicing recognition sequences as genuine splice sites but are not used in splicing reactions. They outnumber genuine splice sites in the human genome by an order of a magnitude and are normally repressed by thus far poorly understood molecular mechanisms. Cryptic 5′ splice sites have the consensus NNN/GUNNNN or NNN/GCNNNN where N is any nucleotide and is the exon-intron boundary. Cryptic 3′ splice sites have the consensus NAG/N. Their activation is positively influenced by surrounding nucleotides that make them more similar to the optimal consensus of authentic splice sites, namely MAG/GURAGU and YAG/G, respectively, where M is C or A, R is G or A, and Y is C or U. Activation of cryptic (or pseudo-) splice sites can be influenced or determined by the balance between the intrinsic strength of aberrant splice sites and their authentic counterparts, the availability of traditional signals in the vicinity of mutated splice sites, exon and intron size, the nature of mutation and by disrupting or creating ESEs, ESSs, ISEs, or ISSs.

[0051] Splice sites and their regulatory sequences can be readily identified by a skilled person using suitable algorithms publicly available, listed, for example, in Kralovicova, J. and Vorechovsky, I. (2007) Global control of aberrant splice site activation by auxiliary splicing sequences: evidence for a gradient in exon and intron definition. Nucleic Acids Res., 35, 6399-6413.

[0052] An exon sequence may contain both 5′ and 3′ alternative splice sites and this may promote RNA-binding proteins, such as U2AF, to the alternative splice sites within the exon sequence, resulting in splicing of a portion of the exon from the pre-mRNA and producing a processed mRNA missing the portion of the exon. The region or sequence between a 5′ alternative splice site and a 3′ alternative splice site within an exon can be referred to an alternative-intron. A pre-mRNA with 5′ and 3′ alternative splice sites located within an exon sequence can be referred to an alternative-intron-containing pre-mRNA (AIC pre-mRNA). In some embodiments, an agent may bind to an alternative splice site or splicing regulatory sequence to prevent binding of RNA-binding proteins and thereby inhibit splicing of an alternative-intron. In some embodiments, an agent may bind to an alternative splice site or splicing regulatory sequence to promote binding of RNA-binding proteins and thereby enhance splicing of an alternative-intron.

[0053] Provided herein are methods and compositions that can modulate aberrant splicing events at alternative splice sites to modulate the level of functional mRNAs encoded by a target gene and expression level of the protein encoded by the target gene. The methods and compositions of the invention can be used to modulate the expression level of a target protein in a subject or in a cell of a subject. For example, the methods and compositions of the invention can be used to increase or decrease the expression level of a target protein (without changing the protein sequence) in a subject or in a cell of a subject. The methods and compositions of the invention can be used to modulate the level of processed mRNA encoding a target protein in a subject or a cell of a subject. For example, the methods and compositions of the invention can be used to increase or decrease the level of processed mRNA encoding a target protein in a subject or a cell of a subject.

[0054] Provided herein is a method of modulating expression of a target protein or a target RNA by cells having an alternative-intron-containing pre-mRNA (AIC pre-mRNA). In one aspect, the AIC pre-mRNA comprises an alternative-intron, a first portion of an exon flanking a 5′ splice site of the alternative-intron, and a second portion of the exon flanking a 3′ splice site of the alternative-intron. In one aspect, the method comprises contacting the cells with a therapeutic agent that binds to a targeted region of the AIC pre-mRNA encoding the target protein or the target RNA, whereby splicing of the alternative-intron from the AIC pre-mRNA encoding the target protein or the target RNA is modulated, thereby modulating a level of processed mRNA encoding the target protein or the target RNA, and modulating the expression of the target protein or the target RNA in the cells.

[0055] Provided herein is a method of treating a disease or a condition in a subject in need thereof by modulating expression of a target protein or a target RNA in a cell of the subject. In one aspect, the method comprises contacting a cell of the subject with a therapeutic agent that modulates splicing of an alternative-intron from an alternative-intron-containing pre-mRNA (AIC pre-mRNA) encoding the target protein or the target RNA, wherein the AIC pre-mRNA comprises the alternative-intron, a first portion of an exon flanking a 5′ splice site of the alternative-intron, a second portion of the exon flanking a 3′ splice site of the alternative-intron, wherein the therapeutic agent binds to a targeted region of the AIC pre-mRNA encoding the target protein or the target RNA, whereby splicing of the alternative-intron from the AIC pre-mRNA encoding the target protein or the target RNA is modulated, thereby modulating a level of processed mRNA encoding the target protein or the target RNA, and modulating the expression of the target protein or the target RNA in the cell of the subject.

[0056] In some embodiments, modulating the expression of the target protein in the cell comprises increasing the expression of the target protein in the cell. In some embodiments, the expression of the target protein in the cell is increased by at least 10, 20, 30, 40, 50, 60, 80, 100, 150, 200, 250, 300, 350, 400, 450, 500, or 1000%, compared to the expression of the target protein that is not modulated. In some embodiments, the expression of the target protein in the cell is increased about 1.1 to about 10-fold, about 1.5 to about 10-fold, about 2 to about 10-fold, about 3 to about 10-fold, about 4 to about 10-fold, about 1.1 to about 5-fold, about 1.1 to about 6-fold, about 1.1 to about 7-fold, about 1.1 to about 8-fold, about 1.1 to about 9-fold, about 2 to about 5-fold, about 2 to about 6-fold, about 2 to about 7-fold, about 2 to about 8-fold, about 2 to about 9-fold, about 3 to about 6-fold, about 3 to about 7-fold, about 3 to about 8-fold, about 3 to about 9-fold, about 4 to about 7-fold, about 4 to about 8-fold, about 4 to about 9-fold, at least about 1.1-fold, at least about 1.5-fold, at least about 2-fold, at least about 2.5-fold, at least about 3-fold, at least about 3.5-fold, at least about 4-fold, at least about 5-fold, or at least about 10-fold, compared to the expression of the target protein that is not modulated.

[0057] In some embodiments, modulating the level of processed mRNA encoding the target protein comprises increasing the level of processed mRNA encoding the target protein. In some embodiments, the level of processed mRNA encoding the target protein in the cell is increased by at least 10, 20, 30, 40, 50, 60, 80, 100, 150, 200, 250, 300, 350, 400, 450, 500, or 1000%, compared to the level of processed mRNA encoding the target protein that is not modulated. In some embodiments, the level of processed mRNA encoding the target protein in the cell is increased about 1.1 to about 10-fold, about 1.5 to about 10-fold, about 2 to about 10-fold, about 3 to about 10-fold, about 4 to about 10-fold, about 1.1 to about 5-fold, about 1.1 to about 6-fold, about 1.1 to about 7-fold, about 1.1 to about 8-fold, about 1.1 to about 9-fold, about 2 to about 5-fold, about 2 to about 6-fold, about 2 to about 7-fold, about 2 to about 8-fold, about 2 to about 9-fold, about 3 to about 6-fold, about 3 to about 7-fold, about 3 to about 8-fold, about 3 to about 9-fold, about 4 to about 7-fold, about 4 to about 8-fold, about 4 to about 9-fold, at least about 1.1-fold, at least about 1.5-fold, at least about 2-fold, at least about 2.5-fold, at least about 3-fold, at least about 3.5-fold, at least about 4-fold, at least about 5-fold, or at least about 10-fold, compared to the level of processed mRNA encoding the target protein that is not modulated.

[0058] In some embodiments, splicing of the alternative-intron from the AIC pre-mRNA encoding the target protein is inhibited. In some embodiments, modulating the level of processed mRNA encoding the target protein comprises modulating the level of processed mRNA that comprises the alternative-intron, the first portion of the exon and the second portion of the exon. In some embodiments, increasing the level of processed mRNA encoding the target protein comprises increasing the level of processed mRNA that comprises the alternative-intron, the first portion of the exon and the second portion of the exon. In some embodiments, decreasing the level of processed mRNA encoding the target protein comprises decreasing the level of processed mRNA that comprises the alternative-intron, the first portion of the exon and the second portion of the exon.

[0059] In some embodiments, splicing of the alternative-intron from the AIC pre-mRNA encoding the target protein is promoted. In some embodiments, modulating the expression of the target protein in the cell comprises decreasing the expression of the target protein in the cell. In some embodiments, the expression of the target protein in the cell is decreased by at least 1, 5, 10, 15, 20, 25, 30, 35, 40, 45, 50, 55, 60, 65, 70, 75, 80, 85, 90, 95, 100%, compared to the expression of the target protein that is not modulated. In some embodiments, the expression of the target protein in the cell is decreased about 1.1 to about 10-fold, about 1.5 to about 10-fold, about 2 to about 10-fold, about 3 to about 10-fold, about 4 to about 10-fold, about 1.1 to about 5-fold, about 1.1 to about 6-fold, about 1.1 to about 7-fold, about 1.1 to about 8-fold, about 1.1 to about 9-fold, about 2 to about 5-fold, about 2 to about 6-fold, about 2 to about 7-fold, about 2 to about 8-fold, about 2 to about 9-fold, about 3 to about 6-fold, about 3 to about 7-fold, about 3 to about 8-fold, about 3 to about 9-fold, about 4 to about 7-fold, about 4 to about 8-fold, about 4 to about 9-fold, at least about 1.1-fold, at least about 1.5-fold, at least about 2-fold, at least about 2.5-fold, at least about 3-fold, at least about 3.5-fold, at least about 4-fold, at least about 5-fold, or at least about 10-fold, compared to the expression of the target protein that is not modulated.

[0060] In some embodiments, modulating the level of processed mRNA encoding the target protein comprises decreasing the level of processed mRNA encoding the target protein. In some embodiments, the level of processed mRNA encoding the target protein in the cell is decreased by at least 1, 5, 10, 15, 20, 25, 30, 35, 40, 45, 50, 55, 60, 65, 70, 75, 80, 85, 90, 95, 100%, compared to the level of processed mRNA encoding the target protein that is not modulated. In some embodiments, the level of processed mRNA encoding the target protein in the cell is decreased about 1.1 to about 10-fold, about 1.5 to about 10-fold, about 2 to about 10-fold, about 3 to about 10-fold, about 4 to about 10-fold, about 1.1 to about 5-fold, about 1.1 to about 6-fold, about 1.1 to about 7-fold, about 1.1 to about 8-fold, about 1.1 to about 9-fold, about 2 to about 5-fold, about 2 to about 6-fold, about 2 to about 7-fold, about 2 to about 8-fold, about 2 to about 9-fold, about 3 to about 6-fold, about 3 to about 7-fold, about 3 to about 8-fold, about 3 to about 9-fold, about 4 to about 7-fold, about 4 to about 8-fold, about 4 to about 9-fold, at least about 1.1-fold, at least about 1.5-fold, at least about 2-fold, at least about 2.5-fold, at least about 3-fold, at least about 3.5-fold, at least about 4-fold, at least about 5-fold, or at least about 10-fold, compared to the level of processed mRNA encoding the target protein that is not modulated.

[0061] In some embodiments, the therapeutic agent is a small molecule. In some embodiments, the therapeutic agent is an antisense oligomer (ASO) complementary to the targeted region of the AIC pre-mRNA. In some embodiments, the therapeutic agent is at least 70%, at least 75%, at least 80%, at least 85%, at least 90%, at least 91%, at least 92%, at least 93%, at least 94%, at least 95%, at least 96%, at least 97%, at least 98%, at least 99%, or 100% complementary to the targeted region of the AIC pre-mRNA encoding the target protein.

[0062] In some embodiments, at least a portion of the targeted region of the AIC pre-mRNA is within an intron upstream of the first portion of the exon. In some embodiments, at least a portion of the targeted region of the AIC pre-mRNA is within an intron downstream of the second portion of the exon. In some embodiments, at least a portion of the targeted region of the AIC pre-mRNA is within the alternative-intron. In some embodiments, at least a portion of the targeted region of the AIC pre-mRNA is within the first portion of the exon. In some embodiments, at least a portion of the targeted region of the AIC pre-mRNA is within the second portion of the exon. In some embodiments, at least a portion of the targeted region of the AIC pre-mRNA overlaps with a junction of the intron upstream of the first portion of the exon and the first portion of the exon. In some embodiments, at least a portion of the targeted region of the AIC pre-mRNA overlaps with a junction of the first portion of the exon and the alternative-intron. In some embodiments, at least a portion of the targeted region of the AIC pre-mRNA overlaps with a junction of the alternative-intron and the second portion of the exon. In some embodiments, at least a portion of the targeted region of the AIC pre-mRNA overlaps with a junction of the second portion of the exon and the intron downstream of the second portion of the exon.

[0063] In some embodiments, the method is a method of increasing the expression of the target protein by cells of a subject having a AIC pre-mRNA encoding the target protein, wherein the subject has a disease or a disorder caused by a deficient amount or activity of the target protein. In some embodiments, the deficient amount of the target protein is caused by haploinsufficiency of the target protein. In some embodiments, the disease or the disorder is associated with haploinsufficiency of a gene encoding the target protein. In some embodiments, the subject has a first allele encoding a functional target protein, and a second allele from which the target protein is not produced. In some embodiments, the subject has a first allele encoding a functional target protein, and a second allele from which the target protein is produced at a reduced level. In another embodiment, the subject has a first allele encoding a functional target protein, and a second allele encoding a nonfunctional target protein. In another embodiment, the subject has a first allele encoding a functional target protein, and a second allele encoding a partially functional target protein. In any of these embodiments, the ASO binds to a targeted region of the AIC pre-mRNA transcribed from the first allele (encoding functional target protein), thereby inhibiting splicing of the alternative-intron from the AIC pre-mRNA, and causing an increase in the level of mature mRNA encoding functional target protein, and an increase in the expression of the target protein in the cells of the subject.

[0064] In some embodiments, the AIC pre-mRNA transcript that encodes the protein that is causative of the disease or condition is targeted by the ASOs described herein. In some embodiments, a AIC pre-mRNA transcript that encodes a protein that is not causative of the disease is targeted by the ASOs. For example, a disease that is a result of a mutation or deficiency of a first protein in a particular pathway may be ameliorated by targeting a AIC pre-mRNA that encodes a second protein, thereby increasing production of the second protein. In some embodiments, the function of the second protein is able to compensate for the mutation or deficiency of the first protein (which is causative of the disease or condition).

[0065] In some embodiments, the AIC pre-mRNA transcript encodes a protein that helps alleviate the disease or condition. For example, the AIC pre-mRNA transcript may encode a signaling protein that may activate or deactivate a signaling pathway associated with the disease. The pathway may be related to immune responses and may cause upregulation of immune response, for example, to combat aberrant cell growth or foreign pathogens. The pathway may be related to immune responses and may cause down regulation of immune response to for example, decrease inflammation or aberrant immune responses (i.e. auto-immune or allergic reactions).

[0066] In some embodiments, the subject has:

[0067] a. a first mutant allele from which
[0068] i) the target protein is produced at a reduced level compared to production from a wild-type allele,
[0069] ii) the target protein is produced in a form having reduced function compared to an equivalent wild-type protein, or
[0070] iii) the target protein or functional RNA is not produced; and

[0071] b. a second mutant allele from which
[0072] i) the target protein is produced at a reduced level compared to production from a wild-type allele,
[0073] ii) the target protein is produced in a form having reduced function compared to an equivalent wild-type protein, and
   wherein the AIC pre-mRNA is transcribed from the first allele and the second allele. In these embodiments, the ASO binds to a targeted region of the AIC pre-mRNA transcribed from the first allele and the second allele, thereby inhibiting splicing of the alternative-intron from the AIC pre-mRNA, and causing an increase in the level of mRNA encoding the target protein and an increase in the expression of the target protein or functional RNA in the cells of the subject. In these embodiments, the target protein or functional RNA having an increase in expression level resulting from inhibiting splicing of the alternative-intron from the AIC pre-mRNA is either in a form having reduced function compared to the equivalent wild-type protein (partially-functional), or having full function compared to the equivalent wild-type protein (fully-functional).

[0074] Disclosed herein is a composition comprising a therapeutic agent for use in a method of modulating expression of a target protein or a target RNA by cells to treat a disease or a condition in a subject in need thereof, associated with an aberrant protein or an aberrant RNA in the subject, wherein the aberrant protein or aberrant RNA is aberrant in amount or activity in the subject, wherein the therapeutic agent modulates splicing of an alternative-intron-containing pre-mRNA (AIC pre-mRNA) encoding the target protein or the target RNA,

wherein the target protein is:
[0075] (a) the aberrant protein;
[0076] (b) a protein which functionally activates or deactivates cellular signaling mechanisms to alter cellular activity associated with the disease or condition;
[0077] (c) a protein which functionally augments or replaces the aberrant protein in the subject; or
[0078] (d) a protein which functionally decreases or inhibits the aberrant protein in the subject;
   and wherein the target RNA is:
[0079] (a) the aberrant RNA;
[0080] (b) an RNA which functionally activates or deactivates cellular signaling mechanisms to alter cellular activity associated with the disease or condition;
[0081] (c) an RNA which functionally augments or replaces the aberrant RNA in the subject; or
[0082] (d) an RNA which functionally decreases or inhibits the aberrant RNA in the subject;
   wherein the AIC pre-mRNA comprising an alternative-intron, a first portion of an exon flanking a 5′ splice site of the alternative-intron, a second portion of the exon flanking a 3′ splice site of the alternative-intron, and whereby splicing of the alternative-intron from the AIC pre-mRNA encoding the target protein or the target RNA is modulated, thereby modulating production or activity of the target protein or the target RNA in the subject.

[0083] In some embodiments, the target protein produced is a fully functional protein. In some embodiments, the target RNA produced is a functional RNA. In some embodiments, the target RNA produced is a fully functional RNA. In some embodiments, the target protein is PD-L1 (CD274). In some embodiments, the target RNA is a functional RNA transcribed from CD274 gene and encoding PD-L1 protein. In some embodiments, the target RNA is a fully functional RNA transcribed from CD274 gene and encoding PD-L1 protein.

### PD-L1 Protein

[0084] The balance between T cell activation, tolerance, and immunopathology plays an important role in autoimmune diseases such as systemic lupus erythematosus (SLE), type I diabetes, rheumatoid arthritis, Graves disease, and multiple sclerosis (MS), as well as in transplant rejection and graft-versus-host disease (GVHD). Among key regulators of T cell responses are programmed death 1 (PD-1; also known as CD279) and its ligands PD-L1 (CD274) and PD-L2. Interaction between PD-1 and its ligands regulates T cell activation by delivering inhibitory signals, thus regulating the immune response by limiting effector T cell responses and protecting tissues from immune-mediated damage.

[0085] First identified as a negative regulator of T cell activation in a mouse model of autoimmunity, the PD-1 protein is a 288 amino acid (aa) type I transmembrane protein that contains one immunoglobulin (Ig) superfamily domain, an immunoreceptor tyrosine-based inhibitory motif (ITIM), and an immunoreceptor tyrosine-based switch motif (ITSM). The PD-1 ligand PD-L1 is a 290 amino acid type I transmembrane protein encoded by the CD274 gene on human chromosome 9 that comprises seven exons. PD-L1 protein has an IgV-like domain, an IgC-like domain, and a short tail of about 30 amino acids of unknown function. Interaction of PD-L1 with the PD-1 receptor is mediated by the IgV-like domain. The human genomic sequence of the CD274 gene is set forth at NCBI Gene ID 29126. The CD274 canonical mRNA sequence is set forth at NCBI Reference Sequence: NM_014143.3.

[0086] PD-L1 is constitutively expressed on both hematopoietic and non-hematopoietic cells, including B cells, T cells, plasmacytoid dendritic cells (pDC), mesenchymal stem cells, and vascular endothelium. Expression of PD-L1 is upregulated by both type I and type II interferons (IFNs) and is decreased in the absence of MyD88, TRAF6, and MEK. Binding of PD-L1 to the PD-1 receptor results in phosphorylation of PD-1 cytoplasmic tyrosines, recruitment of SHP-2, and inhibition of PI3K and Akt activity, ultimately leading to inhibition of T-cell receptor (TCR) signaling that can be overcome by CD28 co-stimulation. In the absence of CD28 co-stimulation, PD-1 ligation decreases induction of cytokines such as IFN-γ and cell survival proteins such as Bcl-xL (Keir et al., 2008, and Trabattoni, et al., 2009, J. Immunol. 183: 4984-4993, incorporated by reference herein). In addition to PD-1, B7-1 has been identified as a binding partner of PD-L1. Interaction between B7-1 and PD-L1 occurs through the IgV-like domains and results in induction of an inhibitory signal in T cells, thereby limiting T cell responses.

[0087] PD1 and PD-L1 play a role in preventing initiation and progression to autoimmunity and in T cell tolerance in the periphery (Keir et al., 2008, and Trabattoni, et al., 2009). For example, a role of PD-1: PD-L1 interaction in autoimmunity has been demonstrated in mice deficient in PD-1. PD-1:PD-L1 interaction plays a role in both positive and negative T cell selection in the thymus, consistent with a role in central tolerance induction. Negative T cell regulation by PD-1: PD-L1 also plays a role in peripheral tolerance by inhibiting responses of self-reactive T cells and mediating responses of T regulatory cells. As an example, loss of PD-1 or PD-L1 was reported to result in rapid or exacerbated diabetes in a mouse model of autoimmune T-cell mediated diabetes. Administration of anti-PD-1 or anti-PD-L1 mAbs during induction of experimental autoimmune encephalomyelitis (EAE) in a mouse model resulted in accelerated disease onset and severity (summarized by Keir et al., 2008). Studies of the NOD mouse (Li et al, 2015, Diabetes 64:529-540; Wang et al, 2008, Diabetes 57:1861-69), EAE (Hirata et al, 2005, J. Immunology 174:1888-1897), contact hypersensitivity (Ritprajak et al, 2010, J. Immunology 184:4918-4925), and lupus nephritis (Ding et al., 2006, Clinical Immunology 118:258-67) indicate that ectopic expression or overexpression of PD-L1 can regulate and suppress pathogenic immune responses (each incorporated by reference herein). In addition to these ectopic, tissue-based overexpression studies, many further reports have evaluated the effects of soluble PD-L1-Fc or -Ig fusions, which provide additional evidence for the immunoregulatory consequences of exogenous/ectopic PD-L1 administration.

[0088] In addition to a role in autoimmunity, interaction of PD-L1 with PD-1 controls organ engraftment and graft-versus-host disease (GVHD). Both PD-1 and PD-L1 are upregulated in alloreactive T cells in transplant recipients and may control alloreactive immune responses. PD-1 is upregulated after the onset of GVHD, and PD-L1 is expressed on most cells in GVHD target organs. Significantly, administration of PD-L1 blocking antibodies accelerated transplant rejection in heart, corneal, and skin transplant models. A central role of PD-L1 in graft tolerance has been demonstrated in a transplant model receiving CTLA-4-Ig treatment to induce tolerance and using CD274−/−mice as transplant donors or recipients. PD-L1 expression in the graft protected from local pathology, and PD-L1 expression in the recipient immune system was required for induction and maintenance of transplantation tolerance. A potential mechanism by which PD-L1 may reduce graft rejection is through induction of T cell apoptosis. Notably, use of PD-1 and PD-L1 blocking antibodies in transplantation models suggested a PD-1 independent role for PD-L1 in promoting tolerance trough induction of alloreactive T cell apoptosis (Keir, et al., 2008). In some embodiments, the methods and compositions of the present invention increase levels of PD-L1 thereby resulting in effects on T cell function including, e.g., pathogenic T cell apoptosis, anergy, and/or exhaustion. In some embodiments, the effect(s) of the methods and compositions of the present invention on T cell function are evaluated by any appropriate method described in the art, e.g., by Keir, et al., 2008.

[0089] The methods and compositions of the invention can be used to increase the expression of PD-L1 in a subject. The increased expression of PD-L1 in autoimmune disease target tissues can result in suppression and/or control of autoimmune responses that are involved in the autoimmune disease. In some embodiments, autoimmune responses, e.g., autoreactive T cell responses, are suppressed and/or controlled by interaction of PD-L1 with PD-1 on activated CD4+ and CD8+ T cells, e.g., killer CD8+ T cells. Overexpression of PD-L1 has been described as inducing a T cell switch from pathogenic CD4+T_{H}1 or T_{H}17 effector phenotypes to a T cell regulatory phenotype, for example, a FOXP3+ regulatory T cells (TRE_{G}) phenotype, in vivo, while maintaining T cell receptor antigen specificity (Amarnath et al., 2011, Science Translational Medicine 3(111):1-13, incorporated herein by reference). In some embodiments, the methods and compositions of the invention are used to increase the expression of PD-L1 to induce a T cell switch from pathogenic CD4+ T cells, e.g., T_{H}1 or T_{H}17 cells, to regulatory T cells, e.g., FOXP3+ T cells. In some embodiments, a switch to a Tr1 regulatory phenotype is induced. Tr1 cells express IL-10, but derive classically from exposure of Th1 cells (expressing Tbet transcription factor) upon exposure to IL-27 and other tolerizing stimuli (potentially PD-L1). In some embodiments, the T cell regulatory phenotype is stably maintained long-term. In some embodiments, long-term stability of the T cell regulatory is indicated by the presence of the T_{REG} phenotype for least about 30 days, at least about 35 days, at least about 40 days, at least about 45 days, at least about 50 days, at least about 55 days, at least about 60 days, at least about 65 days, at least about 70 days, at least about 75 days, at least about 80 days, at least about 85 days, at least about 90 days, at least about 95 days, at least about 100 days, at least about 110 days, at least about 120 days, about 30 days to about 90 days, about 40 days to about 90 days, about 50 days to about 90 days, about 60 days to about 90 days, about 70 days to about 90 days, about 30 days to about 100 days, about 40 days to about 100 days, about 50 days to about 100 days, about 60 days to about 100 days, about 70 days to about 100 days, about 80 days to about 100 days, about 30 days to about 120 days, about 40 days to about 120 days, about 50 days to about 120 days, about 60 days to about 120 days, about 70 days to about 120 days, about 80 days to about 120 days, about 30 days to about 120 days, about 40 days to about 120 days, about 50 days to about 120 days, about 60 days to about 120 days, about 70 days to about 120 days, about 80 days to about 120 days, about 30 days to about 150 days, about 40 days to about 150 days, about 50 days to about 150 days, about 60 days to about 150 days, about 70 days to about 150 days, about 80 days to about 150 days, about 30 days to about 150 days, about 40 days to about 150 days, about 50 days to about 150 days, about 60 days to about 150 days, about 70 days to about 150 days, about 80 days to about 150 days, about 30 days to about 200 days, about 40 days to about 200 days, about 50 days to about 200 days, about 60 days to about 200 days, about 70 days to about 200 days, about 80 days to about 200 days, about 30 days to about 200 days, about 40 days to about 200 days, about 50 days to about 200 days, about 60 days to about 200 days, about 70 days to about 200 days, or about 80 days to about 200 days.

[0090] In some embodiments, the presence of the regulatory T cell phenotype is determined based on the expression of a T_{R}EG-associated marker or secreted cytokine. In some embodiments, the presence of the regulatory T cell phenotype is determined based on the expression of one or more T_{REG}-associated marker selected from: CD4, CD25, CD39, CD73, CD45RO, CD121a (IL-1R1), CD121b (IL-1R2), CD127low, CD134 (OX40), CD137 (4-1BB), CD152 (CTLA-4), CD357 (GITR/AITR), FOXP3, FR4 (m), GARP, Helios, LAP/TGFβ, and TIGIT; and/or expression of one or more TRE_{G}-associated secreted cytokine selected from: IL-10, IL-35, and TGFβ. In some embodiments, the presence of the T_{REG} phenotype is determined based on the expression of FOXP3. T cell marker expression or cytokine secretion can be evaluated by any method known to those of skill in the art and described in the literature, e.g., by Amarnath, et al., 2011, including, e.g., ELISA, Western Blot assay, flow cytometric assay, or any appropriate multiplex assay. Commercial assays are available for measuring production of cytokines, chemokines, cytokine receptors, and activation markers as called for in the methods of the present invention. For example, multiplex assays for detection of human cytokines and chemokines can be created using the BD™ Cytometric Bead Array Flex Set system (BD Biosciences, San Jose, Calif.).

### Alternative-Intron-Containing Pre-mRNA (AIC Pre-mRNA)

[0091] In some embodiments, the methods of the present invention exploit the presence of alternative-intron-containing pre-mRNA (AIC pre-mRNA) transcribed from the CD274 gene and encoding PD-L1 protein, in the cell. Splicing of the identified CD274 AIC pre-mRNA species to produce mature, fully-spliced, CD274 mRNA, is induced using therapeutic agents or antisense oligomers (ASOs) that inhibit splicing of the alternative-introns. The resulting mature CD274 mRNA can be exported to the cytoplasm and translated, thereby increasing the amount of PD-L1 protein in the patient's cells and alleviating symptoms of immune disorders or any disease or disorder associated with deficient amount or activity of PD-L1 protein or induced by a loss-of-function mutation in the CD274 gene.

[0092] Table 1 provides a non-limiting list of sequences of CD274 ASOs, useful for increasing production of PD-L1 by targeting a region of a CD274 AIC pre-mRNA. In some embodiments, other ASOs useful for these purposes are identified, using, e.g., methods described herein.

TABLE 1
List of ASOs targeting the CD274 gene

| SEQ ID | | | Genomic coordinate | | |
|---|---|---|---|---|---|
| NO: | ASO# | ID | Chromosome | Start | End |
| 1 | 1 | CD274-EX4 + 68 | chr9 | 5462900 | 5462918 |
| 2 | 2 | CD274-EX4 + 73 | chr9 | 5462905 | 5462923 |
| 3 | 3 | CD274-EX4 + 78 | chr9 | 5462910 | 5462928 |
| 4 | 4 | CD274-EX4 + 83 | chr9 | 5462915 | 5462933 |
| 5 | 5 | CD274-EX4 + 88 | chr9 | 5462920 | 5462938 |
| 6 | 6 | CD274-EX4 + 93 | chr9 | 5462925 | 5462943 |
| 7 | 7 | CD274-EX4 + 98 | chr9 | 5462930 | 5462948 |
| 8 | 8 | CD274-EX4 + 103 | chr9 | 5462935 | 5462953 |
| 9 | 9 | CD274-EX4 + 108 | chr9 | 5462940 | 5462958 |
| 10 | 10 | CD274-EX4 + 113 | chr9 | 5462945 | 5462963 |
| 11 | 11 | CD274-EX4 + 118 | chr9 | 5462950 | 5462968 |
| 12 | 12 | CD274-EX4 + 123 | chr9 | 5462955 | 5462973 |
| 13 | 13 | CD274-EX4 + 128 | chr9 | 5462960 | 5462978 |
| 14 | 14 | CD274-EX4 + 130 | chr9 | 5462962 | 5462980 |
| 15 | 15 | CD274-EX4 + 132 | chr9 | 5462964 | 5462982 |
| 16 | 16 | CD274-EX4 + 134 | chr9 | 5462966 | 5462984 |
| 17 | 17 | CD274-EX4 + 136 | chr9 | 5462968 | 5462986 |
| 18 | 18 | CD274-EX4 + 138 | chr9 | 5462970 | 5462988 |
| 19 | 19 | CD274-EX4 + 143 | chr9 | 5462975 | 5462993 |
| 20 | 20 | CD274-EX4 + 148 | chr9 | 5462980 | 5462998 |
| 21 | 21 | CD274-EX4 + 153 | chr9 | 5462985 | 5463003 |
| 22 | 22 | CD274-EX4 + 158 | chr9 | 5462990 | 5463008 |
| 23 | 23 | CD274-EX4 + 163 | chr9 | 5462995 | 5463013 |
| 24 | 24 | CD274-EX4 + 168 | chr9 | 5463000 | 5463018 |
| 25 | 25 | CD274-EX4 + 173 | chr9 | 5463005 | 5463023 |
| 26 | 26 | CD274-EX4 + 178 | chr9 | 5463010 | 5463028 |
| 27 | 27 | CD274-EX4 + 183 | chr9 | 5463015 | 5463033 |
| 28 | 28 | CD274-EX4 + 188 | chr9 | 5463020 | 5463038 |
| 29 | 29 | CD274-EX4 + 193 | chr9 | 5463025 | 5463043 |
| 30 | 30 | CD274-EX4 + 198 | chr9 | 5463030 | 5463048 |
| 31 | 31 | CD274-EX4 + 203 | chr9 | 5463035 | 5463053 |
| 32 | 32 | CD274-EX4 + 208 | chr9 | 5463040 | 5463058 |
| 33 | 33 | CD274-EX4 + 213 | chr9 | 5463045 | 5463063 |
| 34 | 34 | CD274-EX4 + 218 | chr9 | 5463050 | 5463068 |
| 35 | 35 | CD274-EX4 + 223 | chr9 | 5463055 | 5463073 |
| 36 | 36 | CD274-EX4 + 226 | chr9 | 5463058 | 5463076 |
| 37 | 37 | CD274-EX4 + 228 | chr9 | 5463060 | 5463078 |
| 38 | 38 | CD274-EX4 + 230 | chr9 | 5463062 | 5463080 |
| 39 | 39 | CD274-EX4 + 233 | chr9 | 5463065 | 5463083 |
| 40 | 40 | CD274-EX4 + 238 | chr9 | 5463070 | 5463088 |
| 41 | 41 | CD274-EX4 + 243 | chr9 | 5463075 | 5463093 |
| 42 | 42 | CD274-EX4 + 248 | chr9 | 5463080 | 5463098 |
| 43 | 43 | CD274-EX4 + 253 | chr9 | 5463085 | 5463103 |
| 44 | 44 | CD274-ex4 + 214 | chr9 | 5463046 | 5463064 |
| 45 | 45 | CD274-ex4 + 215 | chr9 | 5463047 | 5463065 |
| 46 | 46 | CD274-ex4 + 216 | chr9 | 5463048 | 5463066 |
| 47 | 47 | CD274-ex4 + 217 | chr9 | 5463049 | 5463067 |
| 48 | 48 | CD274-ex4 + 219 | chr9 | 5463051 | 5463069 |
| 49 | 49 | CD274-ex4 + 220 | chr9 | 5463052 | 5463070 |
| 50 | 50 | CD274-ex4 + 221 | chr9 | 5463053 | 5463071 |
| 51 | 51 | CD274-ex4 + 222 | chr9 | 5463054 | 5463072 |
| 52 | 52 | CD274-ex4 + 239 | chr9 | 5463071 | 5463089 |
| 53 | 53 | CD274-ex4 + 240 | chr9 | 5463072 | 5463090 |
| 54 | 54 | CD274-ex4 + 241 | chr9 | 5463073 | 5463091 |
| 55 | 55 | CD274-ex4 + 242 | chr9 | 5463074 | 5463092 |
| 56 | 56 | CD274-ex4 + 244 | chr9 | 5463076 | 5463094 |
| 57 | 57 | CD274-ex4 + 245 | chr9 | 5463077 | 5463095 |
| 58 | 58 | CD274-ex4 + 246 | chr9 | 5463078 | 5463096 |
| 59 | 59 | CD274-ex4 + 247 | chr9 | 5463079 | 5463097 |
| 60 | 60 | CD274-ex4 + 249 | chr9 | 5463081 | 5463099 |
| 61 | 61 | CD274-ex4 + 250 | chr9 | 5463082 | 5463100 |
| 62 | 62 | CD274-ex4 + 251 | chr9 | 5463083 | 5463101 |
| 63 | 63 | CD274-ex4 + 252 | chr9 | 5463084 | 5463102 |
| 64 | 64 | CD274-ex4 + 254 | chr9 | 5463086 | 5463104 |
| 65 | 65 | CD274-ex4 + 255 | chr9 | 5463087 | 5463105 |
| 66 | 66 | CD274-ex4 + 256 | chr9 | 5463088 | 5463106 |
| 67 | 67 | CD274-ex4 + 257 | chr9 | 5463089 | 5463107 |

[0093] In some embodiments, the targeted region of the CD274 AIC pre-mRNA is in exon 4. The CD274 intron numbering used herein corresponds to the mRNA sequence at NM_014143.3. In some embodiments, hybridization of an ASO to the targeted region of the AIC pre-mRNA results in inhibition of splicing at the alternative splice site (5′ splice site or 3′ splice site) in the alternative-intron in exon 4 and subsequently increases PD-L1 protein production. It is understood that the intron numbering may change in reference to a different CD274 isoform sequence. One of skill in the art can determine the corresponding intron number in any CD274 isoform based on an intron sequence provided herein or using the intron number provided in reference to the mRNA sequence at NM_014143.3. One of skill in the art also can determine the sequences of flanking exons in any CD274 isoform for targeting using the methods of the invention, based on an intron sequence provided herein or using the intron number provided in reference to the mRNA sequence at NM_014143.3. In some embodiments, the methods and compositions of the present invention are used to increase the expression of any known CD274 isoform.

[0094] In some embodiments, the methods of the present invention exploit the presence of alternative-intron-containing pre-mRNA (AIC pre-mRNA) transcribed from the ARHGAP23 gene and encoding Rho GTPase Activating Protein 23 protein, in the cell. Splicing of the identified ARHGAP23 AIC pre-mRNA species to produce mature, fully-spliced, ARHGAP23 mRNA, is induced using therapeutic agents or antisense oligomers (ASOs) that inhibit splicing of the alternative-introns. The resulting mature ARHGAP23 mRNA can be exported to the cytoplasm and translated, thereby increasing the amount of Rho GTPase Activating Protein 23 protein in the patient's cells and alleviating symptoms of hormonal disorders or any disease or disorder associated with deficient amount or activity of Rho GTPase Activating Protein 23 protein or induced by a loss-of-function mutation in the ARHGAP23 gene.

[0095] In some embodiments, the methods of the present invention exploit the presence of alternative-intron-containing pre-mRNA (AIC pre-mRNA) transcribed from the BRD1 gene and encoding the Bromodomain Containing 1 protein, in the cell. Splicing of the identified BRD1 AIC pre-mRNA species to produce mature, fully-spliced, BRD1 mRNA, is induced using therapeutic agents or antisense oligomers (ASOs) that inhibit splicing of the alternative-introns. The resulting mature BRD1 mRNA can be exported to the cytoplasm and translated, thereby increasing the amount of Bromodomain Containing 1 protein in the patient's cells and alleviating symptoms of immune disorders or any disease or disorder associated with deficient amount or activity of Bromodomain Containing 1 protein or induced by a loss-of-function mutation in the BRD1 gene.

[0096] In some embodiments, the methods of the present invention exploit the presence of alternative-intron-containing pre-mRNA (AIC pre-mRNA) transcribed from the DCHS1 gene and encoding Protocadherin-16 protein, in the cell. Splicing of the identified DCHS1 AIC pre-mRNA species to produce mature, fully-spliced, DCHS1 mRNA, is induced using therapeutic agents or antisense oligomers (ASOs) that inhibit splicing of the alternative-introns. The resulting mature DCHS1 mRNA can be exported to the cytoplasm and translated, thereby increasing the amount of Protocadherin-16 protein in the patient's cells and alleviating symptoms of cardiac disorders or any disease or disorder associated with deficient amount or activity of Protocadherin-16 protein or induced by a loss-of-function mutation in the DCHS1 gene.

[0097] In some embodiments, the methods of the present invention exploit the presence of alternative-intron-containing pre-mRNA (AIC pre-mRNA) transcribed from the EPB41L2 gene and encoding Band 4.1-like protein 2 protein, in the cell. Splicing of the identified EPB41L2 AIC pre-mRNA species to produce mature, fully-spliced, EPB41L2 mRNA, is induced using therapeutic agents or antisense oligomers (ASOs) that inhibit splicing of the alternative-introns. The resulting mature EPB41L2 mRNA can be exported to the cytoplasm and translated, thereby increasing the amount of Band 4.1-like protein 2 protein in the patient's cells and alleviating symptoms of liver related disorders or any disease or disorder associated with deficient amount or activity of Band 4.1-like protein 2 protein or induced by a loss-of-function mutation in the EPB41L2 gene.

[0098] In some embodiments, the methods of the present invention exploit the presence of alternative-intron-containing pre-mRNA (AIC pre-mRNA) transcribed from the GPX8 gene and encoding glutathione peroxidase 8 protein, in the cell. Splicing of the identified GPX8 AIC pre-mRNA species to produce mature, fully-spliced, GPX8 mRNA, is induced using therapeutic agents or antisense oligomers (ASOs) that inhibit splicing of the alternative-introns. The resulting mature GPX8 mRNA can be exported to the cytoplasm and translated, thereby increasing the amount of glutathione peroxidase 8 protein in the patient's cells and alleviating symptoms of liver related disorders or any disease or disorder associated with deficient amount or activity of glutathione peroxidase 8 protein or induced by a loss-of-function mutation in the GPX8 gene.

[0099] In some embodiments, the methods of the present invention exploit the presence of alternative-intron-containing pre-mRNA (AIC pre-mRNA) transcribed from the HIVEP3 gene and encoding Human immunodeficiency virus type I enhancer-binding protein 3 protein, in the cell. Splicing of the identified HIVEP3 AIC pre-mRNA species to produce mature, fully-spliced, HIVEP3 mRNA, is induced using therapeutic agents or antisense oligomers (ASOs) that inhibit splicing of the alternative-introns. The resulting mature HIVEP3 mRNA can be exported to the cytoplasm and translated, thereby increasing the amount of Human immunodeficiency virus type I enhancer-binding protein 3 protein in the patient's cells and alleviating symptoms of immune disorders or any disease or disorder associated with deficient amount or activity of Human immunodeficiency virus type I enhancer-binding protein 3 protein or induced by a loss-of-function mutation in the HIVEP3 gene.

[0100] In some embodiments, the methods of the present invention exploit the presence of alternative-intron-containing pre-mRNA (AIC pre-mRNA) transcribed from the INVS gene and encoding Inversin protein, in the cell. Splicing of the identified INVS AIC pre-mRNA species to produce mature, fully-spliced, INVS mRNA, is induced using therapeutic agents or antisense oligomers (ASOs) that inhibit splicing of the alternative-introns. The resulting mature INVS mRNA can be exported to the cytoplasm and translated, thereby increasing the amount of Inversin protein in the patient's cells and alleviating symptoms of immune disorders or any disease or disorder associated with deficient amount or activity of Inversin protein or induced by a loss-of-function mutation in the INVS gene.

[0101] In some embodiments, the methods of the present invention exploit the presence of alternative-intron-containing pre-mRNA (AIC pre-mRNA) transcribed from the KIAA0319 gene and encoding Dyslexia-associated protein KIAA0319 protein, in the cell. Splicing of the identified KIAA0319 AIC pre-mRNA species to produce mature, fully-spliced, KIAA0319 mRNA, is induced using therapeutic agents or antisense oligomers (ASOs) that inhibit splicing of the alternative-introns. The resulting mature KIAA0319 mRNA can be exported to the cytoplasm and translated, thereby increasing the amount of Dyslexia-associated protein KIAA0319 protein in the patient's cells and alleviating symptoms of developmental disorders or any disease or disorder associated with deficient amount or activity of Dyslexia-associated protein KIAA0319 protein or induced by a loss-of-function mutation in the KIAA0319 gene.

[0102] In some embodiments, the methods of the present invention exploit the presence of alternative-intron-containing pre-mRNA (AIC pre-mRNA) transcribed from the NAIP gene and encoding NLR Family Apoptosis Inhibitory protein, in the cell. Splicing of the identified NAIP AIC pre-mRNA species to produce mature, fully-spliced, NAIP mRNA, is induced using therapeutic agents or antisense oligomers (ASOs) that inhibit splicing of the alternative-introns. The resulting mature NAIP mRNA can be exported to the cytoplasm and translated, thereby increasing the amount of NLR Family Apoptosis Inhibitory protein in the patient's cells and alleviating symptoms of muscle related disorders or any disease or disorder associated with deficient amount or activity of NLR Family Apoptosis Inhibitory protein or induced by a loss-of-function mutation in the NAIP gene.

[0103] In some embodiments, the methods of the present invention exploit the presence of alternative-intron-containing pre-mRNA (AIC pre-mRNA) transcribed from the PTCH2 gene and encoding Protein patched homolog 2 protein, in the cell. Splicing of the identified PTCH2 AIC pre-mRNA species to produce mature, fully-spliced, PTCH2 mRNA, is induced using therapeutic agents or antisense oligomers (ASOs) that inhibit splicing of the alternative-introns. The resulting mature PTCH2 mRNA can be exported to the cytoplasm and translated, thereby increasing the amount of Protein patched homolog 2 protein in the patient's cells and alleviating symptoms of immune disorders or any disease or disorder associated with deficient amount or activity of Protein patched homolog 2 protein or induced by a loss-of-function mutation in the PTCH2 gene.

[0104] In some embodiments, the methods of the present invention exploit the presence of alternative-intron-containing pre-mRNA (AIC pre-mRNA) transcribed from the PTPRZ1 gene and encoding Protein Tyrosine Phosphatase Receptor Type Z1 protein, in the cell. Splicing of the identified PTPRZ1 AIC pre-mRNA species to produce mature, fully-spliced, PTPRZ1 mRNA, is induced using therapeutic agents or antisense oligomers (ASOs) that inhibit splicing of the alternative-introns. The resulting mature PTPRZ1 mRNA can be exported to the cytoplasm and translated, thereby increasing the amount of Protein Tyrosine Phosphatase Receptor Type Z1 protein in the patient's cells and alleviating symptoms of mental disorders or any disease or disorder associated with deficient amount or activity of Protein Tyrosine Phosphatase Receptor Type Z1 or induced by a loss-of-function mutation in the PTPRZ1 gene.

[0105] In some embodiments, the methods of the present invention exploit the presence of alternative-intron-containing pre-mRNA (AIC pre-mRNA) transcribed from the SONgene and encoding SON protein, in the cell. Splicing of the identified SON AIC pre-mRNA species to produce mature, fully-spliced, SON mRNA, is induced using therapeutic agents or antisense oligomers (ASOs) that inhibit splicing of the alternative-introns. The resulting mature SON mRNA can be exported to the cytoplasm and translated, thereby increasing the amount of SON protein in the patient's cells and alleviating symptoms of immune disorders or any disease or disorder associated with deficient amount or activity of SON protein or induced by a loss-of-function mutation in the SON gene.

[0106] In some embodiments, the methods of the present invention exploit the presence of alternative-intron-containing pre-mRNA (AIC pre-mRNA) transcribed from the ZCCHC2 gene and encoding Zinc finger CCHC domain-containing protein 2 protein, in the cell. Splicing of the identified ZCCHC2 AIC pre-mRNA species to produce mature, fully-spliced, ZCCHC2 mRNA, is induced using therapeutic agents or antisense oligomers (ASOs) that inhibit splicing of the alternative-introns. The resulting mature ZCCHC2 mRNA can be exported to the cytoplasm and translated, thereby increasing the amount of Zinc finger CCHC domain-containing protein 2 protein in the patient's cells and alleviating symptoms of immune disorders or any disease or disorder associated with deficient amount or activity of Zinc finger CCHC domain-containing protein 2 protein or induced by a loss-of-function mutation in the ZCCHC2 gene.

[0107] Table 3 provides a non-limiting list of sequences of ASOs, useful for increasing production of proteins encoded by ARHGAP23, BRD1, DCHS1, EPB41L2, GPX8, HIVEP3, INVS, KIAA0319, NAIP, PD-L1, PTCH2, PTPRZ1, SON, ZCCHC2 by targeting a region of the AIC pre-mRNA. In some embodiments, other ASOs useful for these purposes are identified, using, e.g., methods described herein.

### Protein Expression

[0108] In some embodiments, the methods described herein are used to increase the production of a protein in a subject in need thereof. In some embodiments, the methods described herein are used to increase the production of a functional protein in a subject in need thereof. As used herein, the term “functional” refers to the amount of activity or function of a protein that is necessary to eliminate any one or more symptoms of a treated condition, e.g., a mental disorder caused by a genetic defect in BRD1 gene. In some embodiments, the methods are used to increase the production of a fully functional protein or RNA. In some embodiments, the methods are used to increase the production of a partially functional protein or RNA. As used herein, the term “partially functional” refers to any amount of activity or function of the protein that is less than the amount of activity or function that is necessary to eliminate or prevent any one or more symptoms of a disease or condition. In some embodiments, a partially functional protein or RNA will have at least 10%, at least 20%, at least 30%, at least 40%, at least 50%, at least 60%, at least 70%, at least 75%, at least 80%, 85%, at least 90%, or at least 95% less activity relative to the fully functional protein or RNA. In some embodiments, the target protein and the RIC pre-mRNA are encoded by a gene selected from: ARHGAP23, BRD1, DCHS1, EPB41L2, GPX8, HIVEP3, INVS, KIAA0319, NAIP, PD-L1, PTCH2, PTPRZ1, SON, ZCCHC2.

[0109] In some embodiments, the methods described herein are used to increase the production of a PD-L1 protein in a subject in need thereof. In some embodiments, the methods described herein are used to increase the production of a functional PD-L1 protein in a subject in need thereof. As used herein, the term “functional” refers to the amount of activity or function of a PD-L1 protein that is necessary to eliminate any one or more symptoms of a treated condition, e.g., an immune disorder caused by a genetic defect in PD-L1. In some embodiments, the methods are used to increase the production of a fully functional PD-L1 protein or RNA. In some embodiments, the methods are used to increase the production of a partially functional PD-L1 protein or RNA. In some embodiments, the method is a method of increasing the expression of the target protein by cells of a subject having an AIC pre-mRNA encoding the target protein, wherein the subject has an immune disease or disorder caused by a deficient amount or activity of the target protein. In some embodiments, the deficient amount of the target protein is caused by haploinsufficiency of the target protein. In some embodiments, the disease or disorder is associated with haploinsufficiency of a gene encoding the target protein. In such embodiments, the subject has a first allele encoding a functional the target protein, and a second allele from which the target protein is not produced. In such embodiments, the subject has a first allele encoding a functional target protein, and a second allele from which the target protein is produced at a reduced level. In another such embodiment, the subject has a first allele encoding a functional the target protein, and a second allele encoding a nonfunctional target protein. In another such embodiment, the subject has a first allele encoding a functional the target protein, and a second allele encoding a partially functional the target protein. In any of these embodiments, the ASO binds to a targeted region of the AIC pre-mRNA transcribed from both alleles, the first allele (encoding the functional target protein) and the second allele (from which the target protein is not produced or the target protein is produced at reduced level or the target protein is non-functional), thereby inhibiting splicing of the alternative-intron from the AIC pre-mRNA, and causing an increase in the level of mature mRNA from the first allele encoding the functional target protein, and an increase in the expression of the target protein in the cells of the subject. In some embodiments, the target protein and the RIC pre-mRNA are encoded by a gene selected from: ARHGAP23, BRD1, DCHS1, EPB41L2, GPX8, HIVEP3, INVS, KIAA0319, NAIP, CD274, PTCH2, PTPRZ1, SON, ZCCHC2.

[0110] In some embodiments, the method is a method of increasing the expression of PD-L1 protein by cells of a subject having an AIC pre-mRNA encoding PD-L1 protein, wherein the subject has an immune disease or disorder caused by a deficient amount or activity of PD-L1 protein. In some embodiments, the deficient amount of PD-L1 protein is caused by haploinsufficiency of PD-L1 protein. In some embodiments, the disease or disorder is associated with haploinsufficiency of a gene encoding PD-L1 protein. In such embodiments, the subject has a first allele encoding a functional PD-L1 protein, and a second allele from which PD-L1 protein is not produced. In such embodiments, the subject has a first allele encoding a functional PD-L1 protein, and a second allele from which PD-L1 protein is produced at a reduced level. In another such embodiment, the subject has a first allele encoding a functional PD-L1 protein, and a second allele encoding a nonfunctional PD-L1 protein. In another such embodiment, the subject has a first allele encoding a functional PD-L1 protein, and a second allele encoding a partially functional PD-L1 protein. In any of these embodiments, the ASO binds to a targeted region of the AIC pre-mRNA transcribed from the first allele (encoding functional PD-L1 protein), thereby inhibiting splicing of the alternative-intron from the AIC pre-mRNA, and causing an increase in the level of mature mRNA encoding functional PD-L1 protein, and an increase in the expression of PD-L1 protein in the cells of the subject.

[0111] In some embodiments, the subject has a first allele encoding a functional the target protein, and a second allele encoding a partially functional the target protein, and the ASO binds to a targeted region of the AIC pre-mRNA transcribed from the first allele (encoding functional the target protein) or a targeted region of the AIC pre-mRNA transcribed from the second allele (encoding partially functional the target protein), thereby inhibiting splicing of the alternative-intron from the AIC pre-mRNA, and causing an increase in the level of mature mRNA encoding the target protein, and an increase in the expression of functional or partially functional the target protein in the cells of the subject. In some embodiments, the target protein and the RIC pre-mRNA are encoded by a gene selected from: ARHGAP23, BRD1, DCHS1, EPB41L2, GPX8, HIVEP3, INVS, KIAA0319, NAIP, PD-L1, PTCH2, PTPRZ1, SON, ZCCHC2.

[0112] In some embodiments, the subject has a first allele encoding a functional PD-L1 protein, and a second allele encoding a partially functional PD-L1 protein, and the ASO binds to a targeted region of the AIC pre-mRNA transcribed from the first allele (encoding functional PD-L1 protein) or a targeted region of the AIC pre-mRNA transcribed from the second allele (encoding partially functional PD-L1 protein), thereby inhibiting splicing of the alternative-intron from the AIC pre-mRNA, and causing an increase in the level of mature mRNA encoding PD-L1 protein, and an increase in the expression of functional or partially functional PD-L1 protein in the cells of the subject.

[0113] In related embodiments, the method is a method of using an ASO to increase the expression of a protein or functional RNA. In some embodiments, the target protein and the RIC pre-mRNA are encoded by a gene selected from: ARHGAP23, BRD1, DCHS1, EPB41L2, GPX8, HIVEP3, INVS, KIAA0319, NAIP, CD274, PTCH2, PTPRZ1, SON, ZCCHC2. In some embodiments, an ASO is used to increase the expression of PD-L1 protein in cells of a subject having an AIC pre-mRNA encoding PD-L1 protein, wherein the subject has a deficiency in the amount or function of a PD-L1 protein.

[0114] In some embodiments, the AIC pre-mRNA transcript that encodes the protein that is causative of the disease or condition is targeted by the ASOs described herein. In some embodiments, an AIC pre-mRNA transcript that encodes a protein that is not causative of the disease is targeted by the ASOs. For example, a disease that is the result of a mutation or deficiency of a first protein in a particular pathway may be ameliorated by targeting an AIC pre-mRNA that encodes a second protein, thereby increasing production of the second protein. In some embodiments, the function of the second protein is able to compensate for the mutation or deficiency of the first protein (which is causative of the disease or condition).

[0115] In some embodiments, the subject has:

[0116] a. a first mutant allele from which
[0117] i) protein is produced at a reduced level compared to production from a wild-type allele,
[0118] ii) protein is produced in a form having reduced function compared to an equivalent wild-type protein, or
[0119] iii) protein or functional RNA is not produced; and

[0120] b. a second mutant allele from which
[0121] i) protein is produced at a reduced level compared to production from a wild-type allele,
[0122] ii) protein is produced in a form having reduced function compared to an equivalent wild-type protein, and
   wherein the AIC pre-mRNA is transcribed from the first allele and the second allele and wherein the target protein or the functional RNA are encoded by a gene selected from: ARHGAP23, BRD1, DCHS1, EPB41L2, GPX8, HIVEP3, INVS, KIAA0319, NAIP, CD274, PTCH2, PTPRZ1, SON, ZCCHC2. In these embodiments, the ASO binds to a targeted region of the AIC pre-mRNA transcribed from the first allele and the second allele, thereby inhibiting splicing of the alternative-intron from the AIC pre-mRNA, and causing an increase in the level of mRNA encoding the protein and an increase in the expression of the target protein or target functional RNA in the cells of the subject. In these embodiments, the protein or functional RNA having an increase in expression level resulting from inhibiting splicing of the alternative-intron from the AIC pre-mRNA is either in a form having reduced function compared to the equivalent wild-type protein (partially-functional), or having full function compared to the equivalent wild-type PD-L1 protein (fully-functional).

[0123] In some embodiments, the level of processed mRNA encoding the target protein is increased about 1.1 to about 10-fold, about 1.5 to about 10-fold, about 2 to about 10-fold, about 3 to about 10-fold, about 4 to about 10-fold, about 1.1 to about 5-fold, about 1.1 to about 6-fold, about 1.1 to about 7-fold, about 1.1 to about 8-fold, about 1.1 to about 9-fold, about 2 to about 5-fold, about 2 to about 6-fold, about 2 to about 7-fold, about 2 to about 8-fold, about 2 to about 9-fold, about 3 to about 6-fold, about 3 to about 7-fold, about 3 to about 8-fold, about 3 to about 9-fold, about 4 to about 7-fold, about 4 to about 8-fold, about 4 to about 9-fold, at least about 1.1-fold, at least about 1.5-fold, at least about 2-fold, at least about 2.5-fold, at least about 3-fold, at least about 3.5-fold, at least about 4-fold, at least about 5-fold, or at least about 10-fold, compared to the level of processed mRNA encoding the target protein in a control cell, e.g., one that is not treated with the ASO or one that is treated with an ASO that does not bind to the targeted region of the target AIC pre-mRNA; wherein the target protein is encoded by a gene selected from: ARHGAP23, BRD1, DCHS1, EPB41L2, GPX8, HIVEP3, INVS, KIAA0319, NAIP, CD274, PTCH2, PTPRZ1, SON, ZCCHC2.

[0124] In some embodiments, a subject treated using the methods of the invention expresses a partially functional the target protein from one allele, wherein the partially functional the target protein is caused by a frameshift mutation, a nonsense mutation, a missense mutation, a splicing mutation, or a partial gene deletion. In some embodiments, a subject treated using the methods of the invention expresses a nonfunctional the target protein from one allele, wherein the nonfunctional the target protein is caused by a frameshift mutation, a nonsense mutation, a missense mutation, a splicing mutation, or a partial gene deletion, in one allele. In some embodiments, a subject treated using the methods of the invention has a target whole gene deletion, in one allele. In some embodiments, the target protein is encoded by a gene selected from: ARHGAP23, BRD1, DCHS1, EPB41L2, GPX8, HIVEP3, INVS, KIAA0319, NAIP, CD274, PTCH2, PTPRZ1, SON, ZCCHC2.

### Increasing Protein Expression

[0125] As described above, in some embodiments, the methods of the invention are used to increase expression of the target protein. The target protein may be encoded by a gene selected from: ARHGAP23, BRD1, DCHS1, EPB41L2, GPX8, HIVEP3, INVS, KIAA0319, NAIP, CD274, PTCH2, PTPRZ1, SON, ZCCHC2. In these embodiments, an alternative-intron pre-mRNA (AIC pre-mRNA) encoding the target protein is present in the nucleus of a cell. Cells having a the target AIC pre-mRNA that comprises an alternative-intron, a first portion of an exon flanking a 5′ splice site of the alternative-intron, and a second portion of the exon flanking a 3′ splice site of the alternative-intron, encoding the target protein, are contacted with antisense oligomers (ASOs) that are complementary to a targeted region of the AIC pre-mRNA. Hybridization of the ASOs to the targeted region of the AIC pre-mRNA results in inhibition of splicing of the alternative-intron and subsequently increases target protein production.

[0126] The terms “pre-mRNA,” and “pre-mRNA transcript” may be used interchangeably and refer to any pre-mRNA species that contains at least one intron. In some embodiments, pre-mRNA or pre-mRNA transcripts comprise a 5′-7-methylguanosine cap and/or a poly-A tail. In some embodiments, pre-mRNA or pre-mRNA transcripts comprise both a 5′-7-methylguanosine cap and a poly-A tail. In some embodiments, the pre-mRNA transcript does not comprise a 5′-7-methylguanosine cap and/or a poly-A tail. A pre-mRNA transcript is a non-productive messenger RNA (mRNA) molecule if it is not translated into a protein (or transported into the cytoplasm from the nucleus).

[0127] As used herein, a “alternative-intron-containing pre-mRNA” (“AIC pre-mRNA”) is a pre-mRNA transcript that contains at least one alternative-intron. The AIC pre-mRNA contains an alternative-intron, a first portion of an exon flanking a 5′ splice site of the alternative-intron, and a second portion of the exon flanking a 3′ splice site of the alternative-intron and encodes the target protein. A “AIC pre-mRNA encoding a target protein” is understood to encode the target protein when fully spliced. A “alternative-intron” is a region or sequence between a 5′ alternative splice site and a 3′ alternative splice site within an exon in a pre-mRNA transcript that can be spliced out when the pre-mRNA is processed to produce an mRNA (the processed mRNA is missing a portion of the exon).

[0128] In some embodiments, the therapeutic agent or the ASO is at least 70%, at least 75%, at least 80%, at least 85%, at least 90%, at least 95%, at least 98%, at least 99%, or 100%, complementary to the targeted region of the AIC pre-mRNA encoding the target protein. In some embodiments, at least a portion of the targeted region of the target AIC pre-mRNA is within an intron upstream of the first portion of the exon. In some embodiments, at least a portion of the targeted region of the target AIC pre-mRNA is within an intron downstream of the second portion of the exon. In some embodiments, at least a portion of the targeted region of the target AIC pre-mRNA is within the alternative-intron. In some embodiments, at least a portion of the targeted region of the target AIC pre-mRNA is within the first portion of the exon. In some embodiments, at least a portion of the targeted region of the target AIC pre-mRNA is within the second portion of the exon. In some embodiments, at least a portion of the targeted region of the target AIC pre-mRNA overlaps with a junction of the first portion of the exon and the alternative-intron. In some embodiments, at least a portion of the targeted region of the target AIC pre-mRNA overlaps with a junction of the alternative-intron and the second portion of the exon. As used to identify the location of a region or sequence, “within” is understood to include the residues at the positions recited. For example, a region +6 to +100 includes the residues at positions+6 and +100. In some embodiments, the target AIC pre-mRNA is encoded by a gene selected from: ARHGAP23, BRD1, DCHS1, EPB41L2, GPX8, HIVEP3, INVS, KIAA0319, NAIP, CD274, PTCH2, PTPRZ1, SON, ZCCHC2.

[0129] In some embodiments, a mature mRNA encoding the target protein is thereby produced. In some embodiments, the target protein produced is fully functional the target protein. In some embodiments, the target RNA produced is functional the target RNA. In some embodiments, the target RNA produced is fully functional the target RNA. The terms “mature mRNA,” “fully-spliced mRNA,” and functional RNA” are used interchangeably herein to describe a fully processed mRNA encoding a target protein (e.g., mRNA that is exported from the nucleus into the cytoplasm and translated into target protein) or a fully processed functional RNA. The term “productive mRNA,” also can be used to describe a fully processed mRNA encoding a target protein.

[0130] As used herein, the term “comprise” or variations thereof such as “comprises” or “comprising” are to be read to indicate the inclusion of any recited feature (e.g. in the case of an ASO, a defined nucleobase sequence) but not the exclusion of any other features. Thus, as used herein, the term “comprising” is inclusive and does not exclude additional, unrecited features (e.g. in the case of an ASO, the presence of additional, unrecited nucleobases).

[0131] In some embodiments of any of the methods and compositions provided herein, “comprising” may be replaced with “consisting essentially of” or “consisting of.” The phrase “consisting essentially of” is used herein to require the specified feature(s) (e.g., nucleobase sequence) as well as those which do not materially affect the character or function of the claimed invention. As used herein, the term “consisting” is used to indicate the presence of the recited feature (e.g., nucleobase sequence) alone (so that in the case of an antisense oligomer consisting of a specified nucleobase sequence, the presence of additional, unrecited nucleobases is excluded).

[0132] As used herein, the “wild-type sequence” refers to the nucleotide sequence for the target gene in the published reference genome deposited in the NCBI repository of biological and scientific information (operated by National Center for Biotechnology Information, National Library of Medicine, 8600 Rockville Pike, Bethesda, Md. USA 20894). As used herein, the “wild-type sequence” refers to the canonical sequence available at NCBI Gene ID 29126. Also used herein, a nucleotide position denoted with an “e” indicates the nucleotide is present in the sequence of an exon (e.g., the exon flanking the 5′ splice site or the exon flanking the 3′ splice site).

[0133] The methods involve contacting cells with a therapeutic agent or an ASO that is complementary to a region of a pre-mRNA encoding the target protein, resulting in increased expression of the target. As used herein, “contacting” or administering to cells refers to any method of providing an ASO in immediate proximity with the cells such that the ASO and the cells interact. A cell that is contacted with an ASO will take up or transport the ASO into the cell. The method involves contacting a condition- or disease-associated or condition- or disease-relevant cell with any of the ASOs described herein. In some embodiments, the ASO may be further modified or attached (e.g., covalently attached) to another molecule to target the ASO to a cell type, enhance contact between the ASO and the condition or disease-associated or condition or disease-relevant cell, or enhance uptake of the ASO.

[0134] As used herein, the term “increasing protein production” or “increasing expression of a target protein” means enhancing the amount of protein that is translated from an mRNA in a cell. A “target protein” may be any protein for which increased expression/production is desired.

[0135] In some embodiments, contacting a cell that expresses the target AIC pre-mRNA with an ASO that is complementary to a targeted region of the target AIC pre-mRNA transcript results in a measurable increase in the amount of the target protein (e.g., a target protein) encoded by the pre-mRNA. Methods of measuring or detecting production of a protein will be evident to one of skill in the art and include any known method, for example, Western blotting, flow cytometry, immunofluorescence microscopy, and ELISA.

[0136] In some embodiments, the therapeutic agent, or ASO increases the expression of the target protein in the cell. In some embodiments, contacting cells with an ASO that is complementary to a targeted region of a the target AIC pre-mRNA transcript results in an increase in the amount of the target protein produced by at least 10, 20, 30, 40, 50, 60, 80, 100, 150, 200, 250, 300, 350, 400, 450, 500, or 1000%, compared to the amount of the protein produced by a cell in the absence of the ASO/absence of treatment. In some embodiments, the expression level of the target protein produced by the cell to which the ASO was contacted is increased about 1.1 to about 10-fold, about 1.5 to about 10-fold, about 2 to about 10-fold, about 3 to about 10-fold, about 4 to about 10-fold, about 1.1 to about 5-fold, about 1.1 to about 6-fold, about 1.1 to about 7-fold, about 1.1 to about 8-fold, about 1.1 to about 9-fold, about 2 to about 5-fold, about 2 to about 6-fold, about 2 to about 7-fold, about 2 to about 8-fold, about 2 to about 9-fold, about 3 to about 6-fold, about 3 to about 7-fold, about 3 to about 8-fold, about 3 to about 9-fold, about 4 to about 7-fold, about 4 to about 8-fold, about 4 to about 9-fold, at least about 1.1-fold, at least about 1.5-fold, at least about 2-fold, at least about 2.5-fold, at least about 3-fold, at least about 3.5-fold, at least about 4-fold, at least about 5-fold, or at least about 10-fold, compared to the expression level of the target protein produced by an control compound. A control compound can be, for example, an oligonucleotide that is not complementary to the targeted region of the AIC pre-mRNA.

[0137] In some embodiments, the therapeutic agent, or ASO increases the level of processed mRNA encoding the target protein or mature mRNA encoding the target protein in the cell. In some embodiments, contacting cells with an ASO that is complementary to a targeted region of the target AIC pre-mRNA transcript results in an increased level of processed mRNA encoding the target, including the mature mRNA encoding the target protein. In some embodiments, the level of processed mRNA encoding the target protein, or the mature mRNA encoding the target protein, is increased by at least 10, 20, 30, 40, 50, 60, 80, 100, 150, 200, 250, 300, 350, 400, 450, 500, or 1000%, compared to the level of processed mRNA encoding the target protein in a cell in the absence of the ASO/absence of treatment. In some embodiments, the level of processed mRNA encoding the target protein, or the mature mRNA encoding the target protein produced in the cell to which the ASO was contacted is increased about 1.1 to about 10-fold, about 1.5 to about 10-fold, about 2 to about 10-fold, about 3 to about 10-fold, about 4 to about 10-fold, about 1.1 to about 5-fold, about 1.1 to about 6-fold, about 1.1 to about 7-fold, about 1.1 to about 8-fold, about 1.1 to about 9-fold, about 2 to about 5-fold, about 2 to about 6-fold, about 2 to about 7-fold, about 2 to about 8-fold, about 2 to about 9-fold, about 3 to about 6-fold, about 3 to about 7-fold, about 3 to about 8-fold, about 3 to about 9-fold, about 4 to about 7-fold, about 4 to about 8-fold, about 4 to about 9-fold, at least about 1.1-fold, at least about 1.5-fold, at least about 2-fold, at least about 2.5-fold, at least about 3-fold, at least about 3.5-fold, at least about 4-fold, at least about 5-fold, or at least about 10-fold compared to the level of processed mRNA or mature RNA in an untreated cell, e.g., an untreated cell or a cell treated with a control compound. A control compound can be, for example, an oligonucleotide that is not complementary to the targeted region of the target AIC pre-mRNA.

### Antisense Oligomers (ASOs)

[0138] One aspect of the present disclosure is methods and compositions comprising therapeutic agents that modulate (e.g., inhibit or enhance) splicing by binding to a targeted region of a AIC pre-mRNA. In some embodiments, the present disclosure includes methods and compositions comprising antisense oligomers (ASOs) that modulate (e.g., inhibit or enhance) splicing by binding to a targeted region of a AIC pre-mRNA. As used herein, the terms “ASO,” “antisense oligomer,” and “antisense oligonucleotide” are used interchangeably and refer to an oligomer such as a polynucleotide, comprising nucleobases that hybridizes to a target nucleic acid (e.g., a CD274 AIC pre-mRNA) sequence by Watson-Crick base pairing or wobble base pairing (G-U). The ASO may have exact sequence complementary to the target sequence or near complementarity (e.g., sufficient complementarity to bind the target sequence and enhancing splicing at a splice site). ASOs are designed so that they bind (hybridize) to a target nucleic acid (e.g., a targeted region of a pre-mRNA transcript) and remain hybridized under physiological conditions. Typically, if they hybridize to a site other than the intended (targeted) nucleic acid sequence, they hybridize to a limited number of sequences that are not a target nucleic acid (to a few sites other than a target nucleic acid). Design of an ASO can take into consideration the occurrence of the nucleic acid sequence of the targeted region of the pre-mRNA transcript or a sufficiently similar nucleic acid sequence in other locations in the genome or cellular pre-mRNA or transcriptome, such that the likelihood the ASO will bind other sites and cause “off-target” effects is limited. Any ASOs known in the art, for example in PCT Application No. PCT/US2014/054151, published as WO 2015/035091, titled “Reducing Nonsense-Mediated mRNA Decay,” can be used to practice the methods described herein.

[0139] In some embodiments, ASOs “specifically hybridize” to or are “specific” to a target nucleic acid or a targeted region of a AIC pre-mRNA. Typically, such hybridization occurs with a Tm substantially greater than 37° C., preferably at least 50° C., and typically between 60° C. to approximately 90° C. Such hybridization preferably corresponds to stringent hybridization conditions. At a given ionic strength and pH, the Tm is the temperature at which 50% of a target sequence hybridizes to a complementary oligonucleotide.

[0140] Oligomers, such as oligonucleotides, are “complementary” to one another when hybridization occurs in an antiparallel configuration between two single-stranded polynucleotides. A double-stranded polynucleotide can be “complementary” to another polynucleotide, if hybridization can occur between one of the strands of the first polynucleotide and the second. Complementarity (the degree to which one polynucleotide is complementary with another) is quantifiable in terms of the proportion (e.g., the percentage) of bases in opposing strands that are expected to form hydrogen bonds with each other, according to generally accepted base-pairing rules. The sequence of an ASO can be 100% complementary to that of its target nucleic acid to hybridize; however, the sequence of an ASO needs not be 100% complementary to that of its target nucleic acid to hybridize. In certain embodiments, ASOs can comprise at least 70%, at least 75%, at least 80%, at least 85%, at least 90%, at least 95%, at least 96%, at least 97%, at least 98%, or at least 99% sequence complementarity to a target region within the target nucleic acid sequence to which they are targeted. For example, an ASO in which 18 of 20 nucleobases of the oligomeric compound are complementary to a target region, and would therefore specifically hybridize, would represent 90 percent complementarity. In this example, the remaining non-complementary nucleobases may be clustered together or interspersed with complementary nucleobases and need not be contiguous to each other or to complementary nucleobases. Percent complementarity of an ASO with a region of a target nucleic acid can be determined routinely using BLAST programs (basic local alignment search tools) and PowerBLAST programs known in the art (Altschul et al., J. Mol. Biol., 1990, 215, 403-410; Zhang and Madden, Genome Res., 1997, 7, 649-656).

[0141] An ASO needs not hybridize to all nucleobases in a target sequence and the nucleobases to which it does hybridize may be contiguous or noncontiguous. ASOs may hybridize over one or more segments of a pre-mRNA transcript, such that intervening or adjacent segments are not involved in the hybridization event (e.g., a loop structure or hairpin structure may be formed). In certain embodiments, an ASO hybridizes to noncontiguous nucleobases in a target pre-mRNA transcript. For example, an ASO can hybridize to nucleobases in a pre-mRNA transcript that are separated by one or more nucleobase(s) to which the ASO does not hybridize.

[0142] The ASOs described herein comprise nucleobases that are complementary to nucleobases present in a target region of a AIC pre-mRNA. The term ASO embodies oligonucleotides and any other oligomeric molecule that comprises nucleobases capable of hybridizing to a complementary nucleobase on a target mRNA but does not comprise a sugar moiety, such as a peptide nucleic acid (PNA). The ASOs may comprise naturally-occurring nucleotides, nucleotide analogs, modified nucleotides, or any combination of two or three of the preceding. The term “naturally occurring nucleotides” includes deoxyribonucleotides and ribonucleotides. The term “modified nucleotides” includes nucleotides with modified or substituted sugar groups and/or having a modified backbone. In some embodiments, all of the nucleotides of the ASO are modified nucleotides. Chemical modifications of ASOs or components of ASOs that are compatible with the methods and compositions described herein will be evident to one of skill in the art and can be found, for example, in U.S. Pat. No. 8,258,109 B2, U.S. Pat. No. 5,656,612, U.S. Patent Publication No. 2012/0190728, and Dias and Stein, Mol. Cancer Ther. 2002, 1, 347-355, herein incorporated by reference in their entirety.

[0143] The nucleobase of an ASO may be any naturally occurring, unmodified nucleobase such as adenine, guanine, cytosine, thymine, and uracil, or any synthetic or modified nucleobase that is sufficiently similar to an unmodified nucleobase such that it is capable of hydrogen bonding with a nucleobase present on a target pre-mRNA. Examples of modified nucleobases include, without limitation, hypoxanthine, xanthine, 7-methylguanine, 5, 6-dihydrouracil, 5-methylcytosine, and 5-hydroxymethoylcytosine.

[0144] The ASOs described herein also comprise a backbone structure that connects the components of an oligomer. The term “backbone structure” and “oligomer linkages” may be used interchangeably and refer to the connection between monomers of the ASO. In naturally occurring oligonucleotides, the backbone comprises a 3′-5′ phosphodiester linkage connecting sugar moieties of the oligomer. The backbone structure or oligomer linkages of the ASOs described herein may include (but are not limited to) phosphorothioate, phosphorodithioate, phosphoroselenoate, phosphorodiselenoate, phosphoroanilothioate, phosphoraniladate, phosphoramidate, and the like. See e.g., LaPlanche et al., Nucleic Acids Res. 14:9081 (1986); Stec et al., J. Am. Chem. Soc. 106:6077 (1984), Stein et al., Nucleic Acids Res. 16:3209 (1988), Zon et al., Anti Cancer Drug Design 6:539 (1991); Zon et al., Oligonucleotides and Analogues: A Practical Approach, pp. 87-108 (F. Eckstein, Ed., Oxford University Press, Oxford England (1991)); Stec et al., U.S. Pat. No. 5,151,510; Uhlmann and Peyman, Chemical Reviews 90:543 (1990). In some embodiments, the backbone structure of the ASO does not contain phosphorous but rather contains peptide bonds, for example in a peptide nucleic acid (PNA), or linking groups including carbamate, amides, and linear and cyclic hydrocarbon groups. In some embodiments, the backbone modification is a phosphothioate linkage. In some embodiments, the backbone modification is a phosphoramidate linkage.

[0145] In some embodiments, the stereochemistry at each of the phosphorus internucleotide linkages of the ASO backbone is random. In some embodiments, the stereochemistry at each of the phosphorus internucleotide linkages of the ASO backbone is controlled and is not random. For example, U.S. Pat. App. Pub. No. 2014/0194610, “Methods for the Synthesis of Functionalized Nucleic Acids,” incorporated herein by reference, describes methods for independently selecting the handedness of chirality at each phosphorous atom in a nucleic acid oligomer. In some embodiments, an ASO used in the methods of the invention, including, but not limited to, any of the ASOs set forth herein in Table 1 or 3, comprises an ASO having phosphorus internucleotide linkages that are not random. In some embodiments, a composition used in the methods of the invention comprises a pure diastereomeric ASO. In some embodiments, a composition used in the methods of the invention comprises an ASO that has diastereomeric purity of at least about 90%, at least about 91%, at least about 92%, at least about 93%, at least about 94%, at least about 95%, at least about 96%, at least about 97%, at least about 98%, at least about 99%, about 100%, about 90% to about 100%, about 91% to about 100%, about 92% to about 100%, about 93% to about 100%, about 94% to about 100%, about 95% to about 100%, about 96% to about 100%, about 97% to about 100%, about 98% to about 100%, or about 99% to about 100%.

[0146] In some embodiments, the ASO has a nonrandom mixture of Rp and Sp configurations at its phosphorus internucleotide linkages. For example, it has been suggested that a mix of Rp and Sp is required in antisense oligonucleotides to achieve a balance between good activity and nuclease stability (Wan, et al., 2014, “Synthesis, biophysical properties and biological activity of second-generation antisense oligonucleotides containing chiral phosphorothioate linkages,” Nucleic Acids Research 42(22): 13456-13468, incorporated herein by reference). In some embodiments, an ASO used in the methods of the invention, including, but not limited to, any of the ASOs set forth herein in Table 1 or 3, comprises about 5-100% Rp, at least about 5% Rp, at least about 10% Rp, at least about 15% Rp, at least about 20% Rp, at least about 25% Rp, at least about 30% Rp, at least about 35% Rp, at least about 40% Rp, at least about 45% Rp, at least about 50% Rp, at least about 55% Rp, at least about 60% Rp, at least about 65% Rp, at least about 70% Rp, at least about 75% Rp, at least about 80% Rp, at least about 85% Rp, at least about 90% Rp, or at least about 95% Rp, with the remainder Sp, or about 100% Rp. In some embodiments, an ASO used in the methods of the invention, including, but not limited to, any of the ASOs set forth herein in Table 1 or 3, comprises about 10% to about 100% Rp, about 15% to about 100% Rp, about 20% to about 100% Rp, about 25% to about 100% Rp, about 30% to about 100% Rp, about 35% to about 100% Rp, about 40% to about 100% Rp, about 45% to about 100% Rp, about 50% to about 100% Rp, about 55% to about 100% Rp, about 60% to about 100% Rp, about 65% to about 100% Rp, about 70% to about 100% Rp, about 75% to about 100% Rp, about 80% to about 100% Rp, about 85% to about 100% Rp, about 90% to about 100% Rp, or about 95% to about 100% Rp, about 20% to about 80% Rp, about 25% to about 75% Rp, about 30% to about 70% Rp, about 40% to about 60% Rp, or about 45% to about 55% Rp, with the remainder Sp.

[0147] In some embodiments, an ASO used in the methods of the invention, including, but not limited to, any of the ASOs set forth herein in Table 1 or 3, comprises about 5-100% Sp, at least about 5% Sp, at least about 10% Sp, at least about 15% Sp, at least about 20% Sp, at least about 25% Sp, at least about 30% Sp, at least about 35% Sp, at least about 40% Sp, at least about 45% Sp, at least about 50% Sp, at least about 55% Sp, at least about 60% Sp, at least about 65% Sp, at least about 70% Sp, at least about 75% Sp, at least about 80% Sp, at least about 85% Sp, at least about 90% Sp, or at least about 95% Sp, with the remainder Rp, or about 100% Sp. In some embodiments, an ASO used in the methods of the invention, including, but not limited to, any of the ASOs set forth herein in Table 1 or 3, comprises about 10% to about 100% Sp, about 15% to about 100% Sp, about 20% to about 100% Sp, about 25% to about 100% Sp, about 30% to about 100% Sp, about 35% to about 100% Sp, about 40% to about 100% Sp, about 45% to about 100% Sp, about 50% to about 100% Sp, about 55% to about 100% Sp, about 60% to about 100% Sp, about 65% to about 100% Sp, about 70% to about 100% Sp, about 75% to about 100% Sp, about 80% to about 100% Sp, about 85% to about 100% Sp, about 90% to about 100% Sp, or about 95% to about 100% Sp, about 20% to about 80% Sp, about 25% to about 75% Sp, about 30% to about 70% Sp, about 40% to about 60% Sp, or about 45% to about 55% Sp, with the remainder Rp.

[0148] Any of the ASOs described herein may contain a sugar moiety that comprises ribose or deoxyribose, as present in naturally occurring nucleotides, or a modified sugar moiety or sugar analog, including a morpholine ring. Non-limiting examples of modified sugar moieties include 2′ substitutions such as 2′-O-methyl (2′-O-Me), 2′-O-methoxyethyl (2′MOE), 2′-O-aminoethyl, 2′-Fluoro (2′F); N3′->P5′ phosphoramidate, 2′dimethylaminooxyethoxy, 2′dimethylaminoethoxyethoxy, 2′-guanidinidium, 2′-O-guanidinium ethyl, carbamate modified sugars, and bicyclic modified sugars. In some embodiments, the sugar moiety modification is selected from 2′-O-Me, 2′F, and 2′MOE. In some embodiments, the sugar moiety modification is an extra bridge bond, such as in a locked nucleic acid (LNA). In some embodiments the sugar analog contains a morpholine ring, such as phosphorodiamidate morpholino (PMO). In some embodiments, the sugar moiety comprises a ribofuransyl or 2′deoxyribofuransyl modification. In some embodiments, the sugar moiety comprises 2′4′-constrained 2′O-methyloxyethyl (cMOE) modifications. In some embodiments, the sugar moiety comprises cEt 2′, 4′ constrained 2′-0 ethyl BNA modifications. In some embodiments, the sugar moiety comprises tricycloDNA (tcDNA) modifications. In some embodiments, the sugar moiety comprises ethylene nucleic acid (ENA) modifications. In some embodiments, the sugar moiety comprises MCE modifications. Modifications are known in the art and described in the literature, e.g., by Jarver, et al., 2014, “A Chemical View of Oligonucleotides for Exon Skipping and Related Drug Applications,” Nucleic Acid Therapeutics 24(1): 37-47, incorporated by reference for this purpose herein.

[0149] In some examples, each monomer of the ASO is modified in the same way, for example each linkage of the backbone of the ASO comprises a phosphorothioate linkage or each ribose sugar moiety comprises a 2′O-methyl modification. Such modifications that are present on each of the monomer components of an ASO are referred to as “uniform modifications.” In some examples, a combination of different modifications may be desired, for example, an ASO may comprise a combination of phosphorodiamidate linkages and sugar moieties comprising morpholine rings (morpholinos). Combinations of different modifications to an ASO are referred to as “mixed modifications” or “mixed chemistries.”

[0150] In some embodiments, the ASO comprises one or more backbone modification. In some embodiments, the ASO comprises one or more sugar moiety modification. In some embodiments, the ASO comprises one or more backbone modification and one or more sugar moiety modification. In some embodiments, the ASO comprises 2′MOE modifications and a phosphorothioate backbone. In some embodiments, the ASO comprises a phosphorodiamidate morpholino (PMO). In some embodiments, the ASO comprises a peptide nucleic acid (PNA). Any of the ASOs or any component of an ASO (e.g., a nucleobase, sugar moiety, backbone) described herein may be modified in order to achieve desired properties or activities of the ASO or reduce undesired properties or activities of the ASO. For example, an ASO or one or more component of any ASO may be modified to enhance binding affinity to a target sequence on a pre-mRNA transcript; reduce binding to any non-target sequence; reduce degradation by cellular nucleases (i.e., RNase H); improve uptake of the ASO into a cell and/or into the nucleus of a cell; alter the pharmacokinetics or pharmacodynamics of the ASO; and modulate the half-life of the ASO.

[0151] In some embodiments, the ASOs are comprised of 2′-O-(2-methoxyethyl) (MOE) phosphorothioate-modified nucleotides. ASOs comprised of such nucleotides are especially well-suited to the methods disclosed herein; oligomers having such modifications have been shown to have significantly enhanced resistance to nuclease degradation and increased bioavailability, making them suitable, for example, for oral delivery in some embodiments described herein. See e.g., Geary et al., J Pharmacol Exp Ther. 2001; 296(3):890-7; Geary et al., J Pharmacol Exp Ther. 2001; 296(3):898-904.

[0152] Methods of synthesizing ASOs will be known to one of skill in the art. Alternatively or in addition, ASOs may be obtained from a commercial source.

[0153] Unless specified otherwise, the left-hand end of single-stranded nucleic acid (e.g., pre-mRNA transcript, oligonucleotide, ASO, etc.) sequences is the 5′ end and the left-hand direction of single or double-stranded nucleic acid sequences is referred to as the 5′ direction. Similarly, the right-hand end or direction of a nucleic acid sequence (single or double stranded) is the 3′ end or direction. Generally, a region or sequence that is 5′ to a reference point in a nucleic acid is referred to as “upstream,” and a region or sequence that is 3′ to a reference point in a nucleic acid is referred to as “downstream.” Generally, the 5′ direction or end of an mRNA is where the initiation or start codon is located, while the 3′ end or direction is where the termination codon is located. In some aspects, nucleotides that are upstream of a reference point in a nucleic acid may be designated by a negative number, while nucleotides that are downstream of a reference point may be designated by a positive number. For example, a reference point (e.g., an exon-exon junction in mRNA) may be designated as the “zero” site, and a nucleotide that is directly adjacent and upstream of the reference point is designated “minus one,” e.g., “−1,” while a nucleotide that is directly adjacent and downstream of the reference point is designated “plus one,” e.g., “+1.”

[0154] In other embodiments, the ASOs are complementary to (and bind to) a targeted region of a target AIC pre-mRNA that is downstream (in the 3′ direction) of the 5′ splice site of the alternative-intron in a target AIC pre-mRNA (e.g., the direction designated by positive numbers relative to the 5′ alternative splice site of the alternative-intron). In some embodiments, the ASOs are complementary to a targeted region of the target AIC pre-mRNA that is within the region +1 to +100 relative to the 5′ splice site of the alternative-intron. In some embodiments, the ASOs may be complementary to a targeted region of a target AIC pre-mRNA that is within the region between nucleotides +1 and +50 relative to the 5′ splice site of the alternative-intron. In some embodiments, the ASOs are complementary to a targeted region that is within the region +1 to +90, +1 to +80, 16 to +70, +1 to +60, +1 to +50, +1 to +40, +1 to +30, or +1 to +20 relative to 5′ splice site of the alternative-intron. In some embodiments, the target AIC pre-mRNA is encoded by a gene selected from: ARHGAP23, BRD1, DCHS1, EPB41L2, GPX8, HIVEP3, INVS, KIAA0319, NAIP, CD274, PTCH2, PTPRZ1, SON, ZCCHC2.

[0155] In other embodiments, the ASOs are complementary to (and bind to) a targeted region of a CD274 AIC pre-mRNA that is downstream (in the 3′ direction) of the 5′ splice site of the alternative-intron in a CD274 AIC pre-mRNA (e.g., the direction designated by positive numbers relative to the 5′ alternative splice site of the alternative-intron). In some embodiments, the ASOs are complementary to a targeted region of the CD274 AIC pre-mRNA that is within the region +1 to +100 relative to the 5′ splice site of the alternative-intron. In some embodiments, the ASOs may be complementary to a targeted region of a CD274 AIC pre-mRNA that is within the region between nucleotides +1 and +50 relative to the 5′ splice site of the alternative-intron. In some embodiments, the ASOs are complementary to a targeted region that is within the region +1 to +90, +1 to +80, 16 to +70, +1 to +60, +1 to +50, +1 to +40, +1 to +30, or +1 to +20 relative to 5′ splice site of the alternative-intron.

[0156] In some embodiments, the ASOs are complementary to a targeted region of a target AIC pre-mRNA that is upstream (in the 5′ direction) of the 3′ splice site of the alternative-intron in a target AIC pre-mRNA (e.g., in the direction designated by negative numbers) In some embodiments, the ASOs are complementary to a targeted region of the target AIC pre-mRNA that is within the region −1 to −100 relative to the 3′ splice site of the alternative-intron. In some embodiments, the ASOs are complementary to a targeted region of the target AIC pre-mRNA that is within the region −1 to −50 relative to the 3′ splice site of the alternative-intron. In some embodiments, the ASOs are complementary to a targeted region that is within the region −1 to −90, −1 to −80, −1 to −70, −1 to −60, −1 to −50, −1 to −40, or −1 to −30 relative to 3′ splice site of the alternative-intron. In some embodiments, the target AIC pre-mRNA is encoded by a gene selected from: ARHGAP23, BRD1, DCHS1, EPB41L2, GPX8, HIVEP3, INVS, KIAA0319, NAIP, CD274, PTCH2, PTPRZ1, SON, ZCCHC2.

[0157] In some embodiments, the ASOs are complementary to a targeted region of a CD274 AIC pre-mRNA that is upstream (in the 5′ direction) of the 3′ splice site of the alternative-intron in a CD274 AIC pre-mRNA (e.g., in the direction designated by negative numbers) In some embodiments, the ASOs are complementary to a targeted region of the CD274 AIC pre-mRNA that is within the region −1 to −100 relative to the 3′ splice site of the alternative-intron. In some embodiments, the ASOs are complementary to a targeted region of the CD274 AIC pre-mRNA that is within the region −1 to −50 relative to the 3′ splice site of the alternative-intron. In some embodiments, the ASOs are complementary to a targeted region that is within the region −1 to −90, −1 to −80, −1 to −70, −1 to −60, −1 to −50, −1 to −40, or −1 to −30 relative to 3′ splice site of the alternative-intron.

[0158] In some embodiments, the targeted region of the CD274 AIC pre-mRNA is within the region +100 relative to the 5′ splice site of the alternative-intron to −100 relative to the 3′ splice site of the alternative-intron.

[0159] In some embodiments, the ASOs are complementary to a targeted region of a target AIC pre-mRNA that is within the exon flanking the 5′ splice site (upstream) of the alternative-intron (e.g., the first portion of the exon within which the alternative-intron is located). In some embodiments, the ASOs are complementary to a targeted region of the target AIC pre-mRNA that is within the region +2e to −1e in the first portion of the exon flanking the 5′ splice site of the alternative-intron. In some embodiments, the ASOs are complementary to a targeted region of the target AIC pre-mRNA that is within the region −1e to −100e, −1e to −90e, −1e to −80e, −1e to −70e, −1e to −60e, −1e to −50e, −1 to −40e, −1e to −30e, or −1e to −20e relative to the 5′ splice site of the alternative-intron. In some embodiments, the target AIC pre-mRNA is encoded by a gene selected from: ARHGAP23, BRD1, DCHS1, EPB41L2, GPX8, HIVEP3, INVS, KIAA0319, NAIP, CD274, PTCH2, PTPRZ1, SON, ZCCHC2.

[0160] In some embodiments, the ASOs are complementary to a targeted region of a CD274 AIC pre-mRNA that is within the exon flanking the 5′ splice site (upstream) of the alternative-intron (e.g., the first portion of the exon within which the alternative-intron is located). In some embodiments, the ASOs are complementary to a targeted region of the CD274 AIC pre-mRNA that is within the region +2e to −1e in the first portion of the exon flanking the 5′ splice site of the alternative-intron. In some embodiments, the ASOs are complementary to a targeted region of the CD274 AIC pre-mRNA that is within the region −1e to −100e, −1e to −90e, −1e to −80e, −1e to −70e, −1e to −60e, −1e to −50e, −1 to −40e, −1e to −30e, or −1e to −20e relative to the 5′ splice site of the alternative-intron.

[0161] In some embodiments, the ASOs are complementary to a targeted region of a target AIC pre-mRNA that is within the exon flanking the 3′ splice site (downstream) of the alternative-intron (e.g., the second portion of the exon within which the alternative-intron is located). In some embodiments, the ASOs are complementary to a targeted region to the target AIC pre-mRNA that is within the region +1e to −4e in the exon flanking the 3′ splice site of the alternative-intron. In some embodiments, the ASOs are complementary to a targeted region of the target AIC pre-mRNA that is within the region +1e to +100e, +1e to +90e, +1e to +80e, +1e to +70e, +1e to +60e, +1e to +50e, +1e to +40e, +1e to +30e, or +1 to +20e relative to the 3′ splice site of the alternative-intron. In some embodiments, the target AIC pre-mRNA is encoded by a gene selected from: ARHGAP23, BRD1, DCHS1, EPB41L2, GPX8, HIVEP3, INVS, KIAA0319, NAIP, CD274, PTCH2, PTPRZ1, SON, ZCCHC2.

[0162] In some embodiments, the ASOs are complementary to a targeted region of a CD274 AIC pre-mRNA that is within the exon flanking the 3′ splice site (downstream) of the alternative-intron (e.g., the second portion of the exon within which the alternative-intron is located). In some embodiments, the ASOs are complementary to a targeted region to the CD274 AIC pre-mRNA that is within the region +1e to −4e in the exon flanking the 3′ splice site of the alternative-intron. In some embodiments, the ASOs are complementary to a targeted region of the CD274 AIC pre-mRNA that is within the region +1e to +100e, +1e to +90e, +1e to +80e, +1e to +70e, +1e to +60e, +1e to +50e, +1e to +40e, +1e to +30e, or +1e to +20e relative to the 3′ splice site of the alternative-intron.

[0163] In some embodiments, the therapeutic agent or ASO binds to a targeted region of CD274 AIC pre-mRNA. In some embodiments, the targeted region is within a sequence selected from SEQ ID NOs: 68, 69, and 71-76. In some embodiments, the targeted region of the AIC pre-mRNA to which the therapeutic agent or the ASO binds is located within exon 4 of CD274. In some embodiments, the ASO has a sequence selected from SEQ ID NOs: 1-67.

[0164] In some embodiments, the therapeutic agent or ASO binds to a targeted region of ARHGAP23 AIC pre-mRNA. In some embodiments, the targeted region is within a sequence selected from SEQ ID NOs: 77 and 91. In some embodiments, the targeted region of the AIC pre-mRNA to which the therapeutic agent or the ASO binds is located within an exon of ARHGAP23. In some embodiments, the ASO has a sequence selected from SEQ ID NOs: 105-153.

[0165] In some embodiments, the therapeutic agent or ASO binds to a targeted region of BRD1 AIC pre-mRNA. In some embodiments, the targeted region is within a sequence selected from SEQ ID NOs: 78 and 92. In some embodiments, the targeted region of the AIC pre-mRNA to which the therapeutic agent or the ASO binds is located within an exon of BRD1. In some embodiments, the ASO has a sequence selected from SEQ ID NOs: 154-217.

[0166] In some embodiments, the therapeutic agent or ASO binds to a targeted region of DCHS1 AIC pre-mRNA. In some embodiments, the targeted region is within a sequence selected from SEQ ID NOs: 79 and 93. In some embodiments, the targeted region of the AIC pre-mRNA to which the therapeutic agent or the ASO binds is located within an exon of DCHS1. In some embodiments, the ASO has a sequence selected from SEQ ID NOs: 218-334.

[0167] In some embodiments, the therapeutic agent or ASO binds to a targeted region of EPB41L2 AIC pre-mRNA. In some embodiments, the targeted region is within a sequence selected from SEQ ID NOs: 80 and 94. In some embodiments, the targeted region of the AIC pre-mRNA to which the therapeutic agent or the ASO binds is located within an exon of EPB41L2. In some embodiments, the ASO has a sequence selected from SEQ ID NOs: 335-406.

[0168] In some embodiments, the therapeutic agent or ASO binds to a targeted region of GPX8 AIC pre-mRNA. In some embodiments, the targeted region is within a sequence selected from SEQ ID NOs: 81 and 95. In some embodiments, the targeted region of the AIC pre-mRNA to which the therapeutic agent or the ASO binds is located within an exon of GPX8. In some embodiments, the ASO has a sequence selected from SEQ ID NOs: 407-443.

[0169] In some embodiments, the therapeutic agent or ASO binds to a targeted region of HIVEP3 AIC pre-mRNA. In some embodiments, the targeted region is within a sequence selected from SEQ ID NOs: 82 and 96. In some embodiments, the targeted region of the AIC pre-mRNA to which the therapeutic agent or the ASO binds is located within an exon of HIVEP3. In some embodiments, the ASO has a sequence selected from SEQ ID NOs: 444-1027.

[0170] In some embodiments, the therapeutic agent or ASO binds to a targeted region of INVS AIC pre-mRNA. In some embodiments, the targeted region is within a sequence selected from SEQ ID NOs: 83-97. In some embodiments, the targeted region of the AIC pre-mRNA to which the therapeutic agent or the ASO binds is located within an exon of INVS. In some embodiments, the ASO has a sequence selected from SEQ ID NOs: 1028-1112.

[0171] In some embodiments, the therapeutic agent or ASO binds to a targeted region of KA10319 AIC pre-mRNA. In some embodiments, the targeted region is within a sequence selected from SEQ ID NOs: 84-98. In some embodiments, the targeted region of the AIC pre-mRNA to which the therapeutic agent or the ASO binds is located within an exon of KA10319. In some embodiments, the ASO has a sequence selected from SEQ ID NOs: 1113-1212.

[0172] In some embodiments, the therapeutic agent or ASO binds to a targeted region of NAIP AIC pre-mRNA. In some embodiments, the targeted region is within a sequence selected from SEQ ID NOs: 85-99. In some embodiments, the targeted region of the AIC pre-mRNA to which the therapeutic agent or the ASO binds is located within an exon of NAIP. In some embodiments, the ASO has a sequence selected from SEQ ID NOs: 1213-1501.

[0173] In some embodiments, the therapeutic agent or ASO binds to a targeted region of PTCH2 AIC pre-mRNA. In some embodiments, the targeted region is within a sequence selected from SEQ ID NOs: 86-100. In some embodiments, the targeted region of the AIC pre-mRNA to which the therapeutic agent or the ASO binds is located within an exon of PTCH2. In some embodiments, the ASO has a sequence selected from SEQ ID NOs: 1502-1547.

[0174] In some embodiments, the therapeutic agent or ASO binds to a targeted region of PTPRZ1 AIC pre-mRNA. In some embodiments, the targeted region is within a sequence selected from SEQ ID NOs: 87-101. In some embodiments, the targeted region of the AIC pre-mRNA to which the therapeutic agent or the ASO binds is located within an exon of PTPRZ1. In some embodiments, the ASO has a sequence selected from SEQ ID NOs: 1548-2039.

[0175] In some embodiments, the therapeutic agent or ASO binds to a targeted region of SON AIC pre-mRNA. In some embodiments, the targeted region is within a sequence selected from SEQ ID NOs: 88, 89, 102 and 103. In some embodiments, the targeted region of the AIC pre-mRNA to which the therapeutic agent or the ASO binds is located within an exon of SON. In some embodiments, the ASO has a sequence selected from SEQ ID NOs: 2040-3458.

[0176] In some embodiments, the therapeutic agent or ASO binds to a targeted region of ZCCHC2 AIC pre-mRNA. In some embodiments, the targeted region is within a sequence selected from SEQ ID NOs: 90 and 104. In some embodiments, the targeted region of the AIC pre-mRNA to which the therapeutic agent or the ASO binds is located within an exon of ZCCHC2. In some embodiments, the ASO has a sequence selected from SEQ ID NOs: 3459-3651.

[0177] The ASOs may be of any length suitable for specific binding and effective modulation (e.g., inhibition or enhancement) of splicing. In some embodiments, the ASOs consist of 8 to 50 nucleobases. For example, the ASO may be 8, 9, 10, 11, 12, 13, 14, 15, 16, 17, 18, 19, 20, 21, 22, 23, 24, 25, 26, 27, 28, 29, 30, 31, 32, 33, 34, 35, 40, 45, or 50 nucleobases in length. In some embodiments, the ASOs consist of more than 50 nucleobases. In some embodiments, the ASO is from 8 to 50 nucleobases, 8 to 40 nucleobases, 8 to 35 nucleobases, 8 to 30 nucleobases, 8 to 25 nucleobases, 8 to 20 nucleobases, 8 to 15 nucleobases, 9 to 50 nucleobases, 9 to 40 nucleobases, 9 to 35 nucleobases, 9 to 30 nucleobases, 9 to 25 nucleobases, 9 to 20 nucleobases, 9 to 15 nucleobases, 10 to 50 nucleobases, 10 to 40 nucleobases, 10 to 35 nucleobases, 10 to 30 nucleobases, 10 to 25 nucleobases, 10 to 20 nucleobases, 10 to 15 nucleobases, 11 to 50 nucleobases, 11 to 40 nucleobases, 11 to 35 nucleobases, 11 to 30 nucleobases, 11 to 25 nucleobases, 11 to 20 nucleobases, 11 to 15 nucleobases, 12 to 50 nucleobases, 12 to 40 nucleobases, 12 to 35 nucleobases, 12 to 30 nucleobases, 12 to 25 nucleobases, 12 to 20 nucleobases, 12 to 15 nucleobases, 13 to 50 nucleobases, 13 to 40 nucleobases, 13 to 35 nucleobases, 13 to 30 nucleobases, 13 to 25 nucleobases, 13 to 20 nucleobases, 14 to 50 nucleobases, 14 to 40 nucleobases, 14 to 35 nucleobases, 14 to 30 nucleobases, 14 to 25 nucleobases, 14 to 20 nucleobases, 15 to 50 nucleobases, 15 to 40 nucleobases, 15 to 35 nucleobases, 15 to 30 nucleobases, 15 to 25 nucleobases, 15 to 20 nucleobases, 20 to 50 nucleobases, 20 to 40 nucleobases, 20 to 35 nucleobases, 20 to 30 nucleobases, 20 to 25 nucleobases, 25 to 50 nucleobases, 25 to 40 nucleobases, 25 to 35 nucleobases, or 25 to 30 nucleobases in length. In some embodiments, the ASOs are 18 nucleotides in length. In some embodiments, the ASOs are 15 nucleotides in length. In some embodiments, the ASOs are 25 nucleotides in length.

[0178] In some embodiments, two or more ASOs with different chemistries but complementary to the same targeted region of the AIC pre-mRNA are used. In some embodiments, two or more ASOs that are complementary to different targeted regions of the AIC pre-mRNA are used.

[0179] In some embodiments, the ASOs of the invention are chemically linked to one or more moieties or conjugates, e.g., a targeting moiety or other conjugate that enhances the activity or cellular uptake of the oligonucleotide. Such moieties include, but are not limited to, a lipid moiety, e.g., as a cholesterol moiety, a cholesteryl moiety, an aliphatic chain, e.g., dodecandiol or undecyl residues, a polyamine or a polyethylene glycol chain, or adamantane acetic acid. Oligonucleotides comprising lipophilic moieties and preparation methods have been described in the published literature. In some embodiments, the antisense oligonucleotide is conjugated with a moiety including, but not limited to, an abasic nucleotide, a polyether, a polyamine, a polyamide, a peptides, a carbohydrate, e.g., N-acetylgalactosamine (GalNAc), N—Ac-Glucosamine (GluNAc), or mannose (e.g., mannose-6-phosphate), a lipid, or a polyhydrocarbon compound. Conjugates can be linked to one or more of any nucleotides comprising the antisense oligonucleotide at any of several positions on the sugar, base or phosphate group, as understood in the art and described in the literature, e.g., using a linker. Linkers can include a bivalent or trivalent branched linker. In some embodiments, the conjugate is attached to the 3′ end of the antisense oligonucleotide. Methods of preparing oligonucleotide conjugates are described, e.g., in U.S. Pat. No. 8,450,467, “Carbohydrate conjugates as delivery agents for oligonucleotides,” incorporated by reference herein.

[0180] In some embodiments, the nucleic acid to be targeted by an ASO is a CD274 AIC pre-mRNA expressed in a cell, such as a eukaryotic cell. In some embodiments, the term “cell” may refer to a population of cells. In some embodiments, the cell is in a subject. In some embodiments, the cell is isolated from a subject. In some embodiments, the cell is ex vivo. In some embodiments, the cell is in a tissue ex vivo. In some embodiments, the cell is in an organ ex vivo. In some embodiments, the cell is a condition or disease-relevant cell or a cell line. In some embodiments, the cell is in vitro (e.g., in cell culture).

[0181] In some embodiments, the therapeutic agent or the ASO inhibits splicing of the alternative-intron from the AIC pre-mRNA encoding the target protein. In some embodiments, the therapeutic agent or the ASO increases the level of processed mRNA encoding the target protein in the cell. In some embodiments, the level of processed mRNA encoding the target protein in the cell contacted with the therapeutic agent or the ASO is increased about 1.1 to about 10-fold, about 1.5 to about 10-fold, about 2 to about 10-fold, about 3 to about 10-fold, about 4 to about 10-fold, about 1.1 to about 5-fold, about 1.1 to about 6-fold, about 1.1 to about 7-fold, about 1.1 to about 8-fold, about 1.1 to about 9-fold, about 2 to about 5-fold, about 2 to about 6-fold, about 2 to about 7-fold, about 2 to about 8-fold, about 2 to about 9-fold, about 3 to about 6-fold, about 3 to about 7-fold, about 3 to about 8-fold, about 3 to about 9-fold, about 4 to about 7-fold, about 4 to about 8-fold, about 4 to about 9-fold, at least about 1.1-fold, at least about 1.5-fold, at least about 2-fold, at least about 2.5-fold, at least about 3-fold, at least about 3.5-fold, at least about 4-fold, at least about 5-fold, or at least about 10-fold, compared to the level of processed mRNA encoding the target protein in a control cell, e.g., a cell not contacted with a therapeutic agent or an ASO or a cell contacted with a therapeutic agent or an ASO that is not complementary to the targeted region of the AIC pre-mRNA.

[0182] In some embodiments, the therapeutic agent or ASO increases the expression of the target protein in the cell. In some embodiments, the level of the target protein in the cell contacted with the therapeutic agent is increased about 1.1 to about 10-fold, about 1.5 to about 10-fold, about 2 to about 10-fold, about 3 to about 10-fold, about 4 to about 10-fold, about 1.1 to about 5-fold, about 1.1 to about 6-fold, about 1.1 to about 7-fold, about 1.1 to about 8-fold, about 1.1 to about 9-fold, about 2 to about 5-fold, about 2 to about 6-fold, about 2 to about 7-fold, about 2 to about 8-fold, about 2 to about 9-fold, about 3 to about 6-fold, about 3 to about 7-fold, about 3 to about 8-fold, about 3 to about 9-fold, about 4 to about 7-fold, about 4 to about 8-fold, about 4 to about 9-fold, at least about 1.1-fold, at least about 1.5-fold, at least about 2-fold, at least about 2.5-fold, at least about 3-fold, at least about 3.5-fold, at least about 4-fold, at least about 5-fold, or at least about 10-fold, compared to the level of the target protein in a control cell, e.g., a cell not contacted with a therapeutic agent or an ASO or a cell contacted with a therapeutic agent or an ASO that is not complementary to the targeted region of the AIC pre-mRNA.

[0183] In some embodiments, the therapeutic agent or the ASO promotes or enhances splicing of the alternative-intron from the AIC pre-mRNA encoding the target protein. In some embodiments, the therapeutic agent or the ASO decreases the level of processed mRNA encoding the target protein in the cell. In some embodiments, the level of processed mRNA encoding the target protein in the cell contacted with the therapeutic agent is decreased about 1.1 to about 10-fold, about 1.5 to about 10-fold, about 2 to about 10-fold, about 3 to about 10-fold, about 4 to about 10-fold, about 1.1 to about 5-fold, about 1.1 to about 6-fold, about 1.1 to about 7-fold, about 1.1 to about 8-fold, about 1.1 to about 9-fold, about 2 to about 5-fold, about 2 to about 6-fold, about 2 to about 7-fold, about 2 to about 8-fold, about 2 to about 9-fold, about 3 to about 6-fold, about 3 to about 7-fold, about 3 to about 8-fold, about 3 to about 9-fold, about 4 to about 7-fold, about 4 to about 8-fold, about 4 to about 9-fold, at least about 1.1-fold, at least about 1.5-fold, at least about 2-fold, at least about 2.5-fold, at least about 3-fold, at least about 3.5-fold, at least about 4-fold, at least about 5-fold, or at least about 10-fold, compared to the level of processed mRNA encoding the target protein in a control cell, e.g., a cell not contacted with a therapeutic agent or an ASO or a cell contacted with a therapeutic agent or an ASO that is not complementary to the targeted region of the AIC pre-mRNA.

[0184] In some embodiments, the therapeutic agent or ASO decreases the expression of the target protein in the cell. In some embodiments, the level of the target protein in the cell contacted with the therapeutic agent is decreased about 1.1 to about 10-fold, about 1.5 to about 10-fold, about 2 to about 10-fold, about 3 to about 10-fold, about 4 to about 10-fold, about 1.1 to about 5-fold, about 1.1 to about 6-fold, about 1.1 to about 7-fold, about 1.1 to about 8-fold, about 1.1 to about 9-fold, about 2 to about 5-fold, about 2 to about 6-fold, about 2 to about 7-fold, about 2 to about 8-fold, about 2 to about 9-fold, about 3 to about 6-fold, about 3 to about 7-fold, about 3 to about 8-fold, about 3 to about 9-fold, about 4 to about 7-fold, about 4 to about 8-fold, about 4 to about 9-fold, at least about 1.1-fold, at least about 1.5-fold, at least about 2-fold, at least about 2.5-fold, at least about 3-fold, at least about 3.5-fold, at least about 4-fold, at least about 5-fold, or at least about 10-fold, compared to the level of the target protein in a control cell, e.g., a cell not contacted with a therapeutic agent or an ASO or a cell contacted with a therapeutic agent or an ASO that is not complementary to the targeted region of the AIC pre-mRNA.

### Diseases and Disorders

[0185] In some embodiments, the methods and compositions of the present invention are used to treat any immune disease or immune disorder in a subject in need thereof. In some embodiments, an immune disease or an immune disorder treated using the methods and compositions of the present invention is, e.g., an autoimmune disease or an autoimmune disorder, an inflammatory disease or an inflammatory disorder, a chronic infection, graft-versus-host disease (GVHD), a transplant rejection, or a T cell proliferative disorder. In some embodiments, the immune disease or the immune disorder is an autoimmune disease or an autoimmune disorder or an inflammatory disease or an inflammatory disorder selected from: multiple sclerosis, inflammatory bowel disease, autoimmune hepatitis, kidney inflammation, rheumatoid arthritis, psoriasis, lupus nephritis, corneal transplant, and uveitis. In some embodiments, the immune disease of the immune disorder is a disorder that is mediated by T cells, B cells, or NK cells.

[0186] An autoimmune disease or an autoimmune disorder is a condition characterized by cellular, tissue, and/or organ injury caused by an immunologic reaction of a subject to its own cells, tissues, and/or organs. An inflammatory disease or an inflammatory disorder refers to a condition in a subject characterized by inflammation, including, e.g., chronic inflammation. Autoimmune disorders may or may not be associated with inflammation. Inflammation may or may not be caused by an autoimmune disorder. Therefore, certain disorders may be characterized as both autoimmune and inflammatory disorders. An autoimmune disease or an autoimmune disorder treated using the methods and compositions of the invention may be, e.g., alopecia areata, ankylosing spondylitis, antiphospholipid syndrome, autoimmune Addison's disease, autoimmune diseases of the adrenal gland, autoimmune hemolytic anemia, autoimmune hepatitis, autoimmune oophoritis and orchitis, autoimmune thrombocytopenia, Behcet's disease, bullous pemphigoid, cardiomyopathy, celiac sprue-dermatitis, chronic fatigue immune dysfunction syndrome (CFIDS), chronic inflammatory demyelinating polyneuropathy, Churg-Strauss syndrome, cicatrical pemphigoid, CREST syndrome, cold agglutinin disease, Crohn's disease, discoid lupus, essential mixed cryoglobulinemia, diabetes, eosinophilic fascites, fibromyalgia-fibromyositis, glomerulonephritis, Graves' disease, Guillain-Barre, Hashimoto's thyroiditis, Henoch-Schonlein purpura, idiopathic pulmonary fibrosis, idiopathic/autoimmune thrombocytopenia purpura (ITP), IgA neuropathy, juvenile arthritis, lichen planus, lupus erthematosus, Meniere's disease, mixed connective tissue disease, multiple sclerosis, type 1 or immune-mediated diabetes mellitus, myasthenia gravis, pemphigus-related disorders (e.g., pemphigus vulgaris), pernicious anemia, polyarteritis nodosa, polychrondritis, polyglandular syndromes, polymyalgia rheumatica, polymyositis and dermatomyositis, primary agammaglobulinemia, primary biliary cirrhosis, psoriasis, psoriatic arthritis, Raynauld's phenomenon, Reiter's syndrome, Rheumatoid arthritis, sarcoidosis, scleroderma, Sjogren's syndrome, stiff-man syndrome, systemic lupus erythematosis (SLE), Sweet's syndrome, Still's disease, lupus erythematosus, takayasu arteritis, temporal arteristis/giant cell arteritis, ulcerative colitis, uveitis, vasculitides such as dermatitis herpetiformis vasculitis, vitiligo, and Wegener's granulomatosis.

[0187] In some embodiments, an immune disease or an immune disorder treated using the methods and compositions of the present invention is an inflammatory disease or an inflammatory disorder, for example, inflammation accompanying arthritis (e.g., rheumatoid arthritis, osteoarthritis), pneumonia, hepatitis (including viral hepatitis), inflammation accompanying infectious diseases, inflammatory bowel diseases, intestinal enteritis, nephritis (e.g., glomerular nephritis, nephrofibrosis), gastritis, angiitis, pancreatitis, peritonitis, bronchitis, myocarditis, cerebritis, inflammation in postischemic reperfusion injury (myocardial ischemic reperfusion injury), inflammation attributed to immune rejection after transplantation of tissue and organ, burn, various skin inflammation (psoriasis, allergic contact-type dermatitis, lichen planus), inflammation in multiple organ failure, inflammation after operation of PTCA or PTCR, inflammation accompanying arteriosclerosis, autoimmune thyroiditis, asthma, encephilitis, chronic obstructive pulmonary disease (COPD), allergic disorders, septic shock, pulmonary fibrosis, undifferentitated spondyloarthropathy, undifferentiated arthropathy, spondyloarthropathies (e.g., psoriatic arthritis, ankylosing spondylitis, and Reiter's Syndrome or reactive arthritis), inflammatory osteolysis, Wilson's disease and chronic inflammation resulting from chronic viral or bacterial infections.

[0188] In some embodiments, an immune disease or an immune disorder treated using the methods and compositions of the present invention is a chronic inflammatory disease or a chronic inflammatory disorder selected from, e.g., inflammatory bowel disease (including, e.g., Crohn's disease and ulcerative colitis), Grave's disease, Hashimoto's thyroiditis, allergic contact-type dermatitis, chronic inflammatory dermatosis (e.g., lichen planus), and diabetes mellitis.

[0189] In some embodiments, an immune disease or an immune disorder treated using the methods and compositions of the present invention is, e.g., toxic shock syndrome, inflammatory bowel disease, allosensitization due to blood transfusion, or a T-cell dependent B-cell-mediated disease, osteoarthritis (OA), graft versus host reaction (GVH reaction), graft versus host disease (GVHD), immune rejection accompanying transplantation of a tissue (e.g., skin, cornea, bone) or organ (e.g., liver, heart, lung, kidney, pancreas), immune response triggered by a foreign antigen or autoantigen (for example, production of antibodies against said antigen, cell proliferation, production of cytokines), or a disorder caused by abnormal intestinal immunity (e.g., inflammatory intestinal disorders, Crohn's disease, ulcerative colitis, and alimentary allergy).

[0190] Autoimmune diseases can affect any tissue or body part, including but not limited to the heart, brain, nerves, muscles, skin, eyes, joints, lungs, kidneys, glands (e.g., thyroid), the digestive tract, and blood vessels. The autoimmune disease systemic lupus erythematosus can affect the skin, joints, kidneys, heart, nerves, blood vessels, and other tissues. Type 1 diabetes can affect, e.g., glands, eyes, kidneys, and muscles. In some embodiments, a subject treated using the methods and compositions of the invention has a propensity to develop an autoimmune disease at the time of treatment. In some embodiments, a subject treated using the methods and compositions of the invention is treated preventively.

[0191] In some embodiments, a subject having an autoinflammatory disorder is treated using the methods and compositions of the invention. Autoinflammatory disorders are characterized by intense episodes of inflammation that result in such symptoms as fever, rash, or joint swelling. In some cases, an inflammatory disorder arises due to a chronic condition. For example, nonalcoholic steatohepatitis (NASH) is an inflammatory disorder related to fatty liver disease. Other inflammatory disorders contemplated for treatment using the methods and compositions of the present invention include, e.g., Familial Mediterranean Fever (FMF), Neonatal Onset Multisystem Inflammatory Disease (NOMID), Tumor Necrosis Factor (TNF) Receptor-Associated Periodic Syndrome (TRAPS), Deficiency of the Interleukin-1 Receptor Antagonist (DIRA), poststreptococcal and autiommune renal failure, septic shock, systemic inflammatory response syndrome (SIRS), adult respiratory distress syndrome (ARDS), and inflammation due to envenomation.

[0192] Examples of autoimmune disorders treated with the present invention include, e.g., systemic lupus erythematosus, thyroiditis, uveitis, vitiligo, granulomatosis with polyangiitis (Wegener's), multiple sclerosis, systemic lupus erythematosus/lupus nephritis, Hashimoto's thyroiditis, autoimmune hepatitis, myasthenia gravis, myocarditis, multiple sclerosis, pemphigus/pemphigoid, pernicious anemia, polyarteritis nodosa, polymyositis, primary biliary cirrhosis, psoriasis, rheumatoid arthritis, scleroderma/systemic sclerosis, Sjogren's syndrome, alopecia areata, autoimmune hemolytic anemia, autoimmune hepatitis, dermatomyositis, diabetes (type 1), juvenile idiopathic arthritis, glomerulonephritis, Graves' disease, Guillain-Barré syndrome, idiopathic thrombocytopenic purpura, Behcet disease, systemic lupus erythematosus, multiple sclerosis (systemic scleroderma and progressive systemic scleroderma), scleroderma, polymyositis, dermatomyositis, periarteritis nodosa (polyarteritis nodosa and microscopic polyangiitis), aortitis syndrome (Takayasu arteritis), malignant rheumatoid arthritis, rheumatoid arthritis, mixed connective tissue disease, adult-onset Still's disease, allergic granulomatous angiitis, hypersensitivity angiitis, Cogan's syndrome, RS3PE, temporal arteritis, polymyalgia rheumatica, fibromyalgia syndrome, antiphospholipid antibody syndrome, eosinophilic fasciitis, IgG4-related diseases (e.g., primary sclerosing cholangitis and autoimmune pancreatitis), Guillain-Barre syndrome, myasthenia gravis, chronic atrophic gastritis, autoimmune hepatitis, primary biliary cirrhosis, aortitis syndrome, Goodpasture's syndrome, rapidly progressive glomerulonephritis, megaloblastic anemia, autoimmune hemolytic anemia, autoimmune neutropenia, idiopathic thrombocytopenic purpura, Graves' disease (hyperthyroidism), Hashimoto's thyroiditis, autoimmune adrenal insufficiency, primary hypothyroidism, idiopathic Addison's disease (chronic adrenal insufficiency), type I diabetes mellitus, chronic discoid lupus erythematosus, localized scleroderma, psoriasis, psoriatic arthritis, pemphigus, pemphigoid, herpes gestationis, linear IgA bullous skin disease, epidermolysis bullosa acquisita, alopecia areata, vitiligo, Harada disease, autoimmune optic neuropathy, idiopathic azoospermia, recurrent fetal loss, and inflammatory bowel diseases (ulcerative colitis and Crohn's disease).

[0193] In some embodiments, the methods of the present invention involve contacting cells of a subject with an ASO. In some embodiments, the contacted cell is an immune system cell at any state of differentiation. In some embodiments, the cell is a stem cell, a progenitor cell, a dendritic cell, a macrophage, a peritoneal B1 B cell, a memory B cell, a bone marrow (BM)-derived mast cell, a hematopoietic cell, a non-hemopoietic cell, a B cell, or a T cell. In some embodiments, the immune system cell is a T cell. In some embodiments, the T cell is a CD4+ T cell, a CD8+ T cell, or a killer CD8+ T cell. In some embodiments, the T cell is an activated T cell. In some embodiments, the T cell is a pathogenic CD4+T_{H}1 or T_{H}17 effector cell.

[0194] In some embodiments, a cell contacted in the methods of the present invention is a non-hematopoietic cell, e.g., a vascular endothelial cell, a fibroblastic reticular cell, an epithelial cell, a pancreatic islet cell, an astrocyte, a neuron, a Schwann cell of CNS/PNS, a hepatocyte, a cornea, a renal cell or a cell at a site of immune privilege including a trophoblast in the placenta or a retinal pigment epithelial cell or a neuron in the eye, or any other appropriate cell type known in the art and identified for targeting in the treatment of an immunological disorder. In some embodiments, the cell contacted is a cell type that expresses a target protein. In some embodiments, the cell contacted is a cell type that expresses PD-L1.

[0195] In some embodiments of the present invention, a cell is obtained from a subject in need thereof and modified ex vivo with ASOs to induce target protein expression (e.g., PD-L1) and adoptively transferred to a subject. In other embodiments, a cell, e.g., a T_{H}1 cell, can be obtained from a subject in need thereof and induced to convert to a T_{REG} cell and adoptively transferred to a said patient in need thereof. In some cases, a subject in need thereof has a transplant-related autoimmune disease. In some embodiments, GVHD is treated by inducing PD-L1 expression in a target cell population. In some embodiments, an immune disorder is treated by the methods of the invention using ex vivo modified cells. In some embodiments, an immune disorder is treated with a systemic infusion of a therapy of the present invention.

[0196] In some embodiments, the genetic disorder or condition can be an autosomal dominant disorder, an autosomal recessive disorder, X-linked dominant disorder, X-linked recessive disorder, Y-linked disorder, mitochondrial disease, or multifactorial or polygenic disorder. Sometimes, a hereditary disease can also be characterized as an autosomal dominant, autosomal recessive, X-linked dominant, X-linked recessive, Y-linked, mitochondrial, or multifactorial or polygenic hereditary disease. Autosomal dominant disorder, an autosomal recessive disorder, X-linked dominant disorder, X-linked recessive disorder, Y-linked disorder, mitochondrial disease, or multifactorial or polygenic disorder can be characterized by an impaired production of a protein. Autosomal dominant disorder, an autosomal recessive disorder, X-linked dominant disorder, X-linked recessive disorder, Y-linked disorder, mitochondrial disease, or multifactorial or polygenic disorder can be characterized by a defective splicing. A subject with an autosomal dominant disorder, an autosomal recessive disorder, X-linked dominant disorder, X-linked recessive disorder, Y-linked disorder, mitochondrial disease, or multifactorial or polygenic disorder can have a genome that can comprise a copy of a gene that comprises an exon that when properly transcribed into fully processed mRNA can encode the full-length functional for of the protein. A subject with an autosomal dominant disorder, an autosomal recessive disorder, X-linked dominant disorder, X-linked recessive disorder, Y-linked disorder, mitochondrial disease, or multifactorial or polygenic disorder can have a genome that comprises a copy of a gene that can comprise a copy of a gene that comprises a set of exons that when properly transcribed into fully processed mRNA can encode the full-length functional form of the protein. A subject with an autosomal dominant disorder, an autosomal recessive disorder, X-linked dominant disorder, X-linked recessive disorder, Y-linked disorder, mitochondrial disease, or multifactorial or polygenic disorder can have a genome that can comprise a defective copy of the gene, which can be incapable of producing a full-length functional form of the protein.

[0197] Exemplary hereditary disease can include achondroplasia, hereditary hemochromatosis, Down Syndrome, hereditary spherocytosis, Tay-Sachs Disease, Usher syndrome, hereditary fructose intolerance, hemophilia, muscular dystrophy (e.g., Duchenne muscular dystrophy or DMD), polygenic disorders, breast cancer, ovarian cancer, Parkinson's disease, Bardet-Biedl syndrome, Prader-Willi syndrome, diabetes, heart disease, arthritis, motor neuron disease, albinism, Cri-du-Chat syndrome, cystic fibrosis, fragile X syndrome, galactosemia, Huntington's disease, Jackson-Weiss syndrome, Klinefelter syndrome, Krabbe disease, Langer-Giedion syndrome, Lesch-Nyhan syndrome, Marfan syndrome, myotonic dystrophy, Nail-Patella syndrome, neurofibromatosis, Noonan syndrome, triple X syndrome, osteogenesis imperfecta, Patau syndrome, phenylketonuria, porphyria, retinoblastoma, Rett syndrome, sickle cell disease, Turner syndrome, Usher syndrome, Von Hippel-Lindau syndrome, Waardenburg syndrome, Wilson's disease, xeroderma pigmentosum, XXXX syndrome, or YY syndrome.

[0198] A hereditary disease such as for example: achondroplasia, hereditary hemochromatosis, Down Syndrome, hereditary spherocytosis, Tay-Sachs Disease, Usher syndrome, hereditary fructose intolerance, hemophilia, muscular dystrophy (e.g., Duchenne muscular dystrophy or DMD), polygenic disorders, breast cancer, ovarian cancer, Parkinson's disease, Bardet-Biedl syndrome, Prader-Willi syndrome, diabetes, heart disease, arthritis, motor neuron disease, albinism, Cri-du-Chat syndrome, cystic fibrosis, fragile X syndrome, galactosemia, Huntington's disease, Jackson-Weiss syndrome, Klinefelter syndrome, Krabbe disease, Langer-Giedion syndrome, Lesch-Nyhan syndrome, Marfan syndrome, myotonic dystrophy, Nail-Patella syndrome, neurofibromatosis, Noonan syndrome, triple X syndrome, osteogenesis imperfecta, Patau syndrome, phenylketonuria, porphyria, retinoblastoma, Rett syndrome, sickle cell disease, Turner syndrome, Usher syndrome, Von Hippel-Lindau syndrome, Waardenburg syndrome, Wilson's disease, xeroderma pigmentosum, XXXX syndrome, or YY syndrome can be characterized by an impaired production of a protein, or by a defective splicing. A hereditary disease such as for example: achondroplasia, hereditary hemochromatosis, Down Syndrome, hereditary spherocytosis, Tay-Sachs Disease, Usher syndrome, hereditary fructose intolerance, hemophilia, muscular dystrophy (e.g., Duchenne muscular dystrohy or DMD), polygenic disorders, breast cancer, ovarian cancer, Parkinson's disease, Bardet-Biedl syndrome, Prader-Willi syndrome, diabetes, heart disease, arthritis, motor neuron disease, albinism, Cri-du-Chat syndrome, cystic fibrosis, fragile X syndrome, galactosemia, Huntington's disease, Jackson-Weiss syndrome, Klinefelter syndrome, Krabbe disease, Langer-Giedion syndrome. Lesch-Nyhan syndrome, Marfan syndrome, myotonic dystrophy, Nail-Patella syndrome, neurofibromatosis, Noonan syndrome, triple X syndrome, osteogenesis imperfecta, Patau syndrome, phenylketonuria, porphyria, retinoblastoma, Rett syndrome, sickle cell disease, Turner syndrome, Usher syndrome, Von Hippel-Lindau syndrome, Waardenburg syndrome, Wilson's disease, xeroderma pigmentosum, XXXX syndrome, or YY syndrome can comprise a copy of a gene that comprises an exon that when properly transcribed into fully processed mRNA can encode the full-length functional for of the protein, can comprises a copy of a gene that can comprise a copy of a gene that comprises a set of exons that when properly transcribed into fully processed mRNA can encode the full-length functional form of the protein, or can comprise a defective copy of the gene, which can be incapable of producing a full-length functional form of the protein.

[0199] As described above, the genetic disorder or condition can be an autosomal dominant disorder, an autosomal recessive disorder, X-linked dominant disorder, X-linked recessive disorder, Y-linked disorder, mitochondrial disease, or multifactorial or polygenic disorder. The genetic disorder or condition can be an autosomal dominant disorder, an autosomal recessive disorder, X-linked dominant disorder, X-linked recessive disorder, Y-linked disorder, mitochondrial disease, or multifactorial or polygenic disorder can be a disorder characterized by an impaired production of a protein or by a defective splicing.

[0200] Exemplary autosomal dominant disorder can include Huntington's disease, neurofibromatosis type 1, neurofibromatosis type 2, Marfan syndrome, hereditary nonpolyposis colorectal cancer, hereditary multiple exostoses, Tuberous sclerosis, Von Willebrand disease, or acute intermittent porphyria.

### Pharmaceutical Compositions

[0201] Pharmaceutical compositions or formulations comprising the antisense oligomer (ASO) of the described compositions and for use in any of the described methods can be prepared according to conventional techniques well known in the pharmaceutical industry and described in the published literature. In some embodiments, a pharmaceutical composition or formulation for treating a subject comprises an effective amount of any ASO as described above, or a pharmaceutically acceptable salt, solvate, hydrate, or ester thereof, and a pharmaceutically acceptable diluent. The ASO of a pharmaceutical formulation may further comprise a pharmaceutically acceptable excipient, diluent, or carrier.

[0202] Pharmaceutically acceptable salts are suitable for use in contact with the tissues of humans and lower animals without undue toxicity, irritation, allergic response, etc., and are commensurate with a reasonable benefit/risk ratio. The salts can be prepared in situ during the final isolation and purification of the compounds, or separately by reacting the free base function with a suitable organic acid. Examples of pharmaceutically acceptable, nontoxic acid addition salts are salts of an amino group formed with inorganic acids such as hydrochloric acid, hydrobromic acid, phosphoric acid, sulfuric acid and perchloric acid or with organic acids such as acetic acid, oxalic acid, maleic acid, tartaric acid, citric acid, succinic acid or malonic acid or by using other documented methodologies such as ion exchange. Other pharmaceutically acceptable salts include adipate, alginate, ascorbate, aspartate, benzenesulfonate, benzoate, bisulfate, borate, butyrate, camphorate, camphorsulfonate, citrate, cyclopentanepropionate, digluconate, dodecylsulfate, ethanesulfonate, formate, fumarate, glucoheptonate, glycerophosphate, gluconate, hemisulfate, heptanoate, hexanoate, hydroiodide, 2-hydroxy-ethanesulfonate, lactobionate, lactate, laurate, lauryl sulfate, malate, maleate, malonate, methanesulfonate, 2-naphthalenesulfonate, nicotinate, nitrate, oleate, oxalate, palmitate, pamoate, pectinate, persulfate, 3-phenylpropionate, phosphate, picrate, pivalate, propionate, stearate, succinate, sulfate, tartrate, thiocyanate, p-toluenesulfonate, undecanoate, valerate salts, and the like. Representative alkali or alkaline earth metal salts include sodium, lithium, potassium, calcium, magnesium, and the like. Further pharmaceutically acceptable salts include, when appropriate, nontoxic ammonium, quaternary ammonium, and amine cations formed using counterions such as halide, hydroxide, carboxylate, sulfate, phosphate, nitrate, loweralkyl sulfonate, and aryl sulfonate.

[0203] In some embodiments, the compositions are formulated into any of many possible dosage forms such as, but not limited to, tablets, capsules, gel capsules, liquid syrups, soft gels, suppositories, and enemas. In some embodiments, the compositions are formulated as suspensions in aqueous, non-aqueous, or mixed media. Aqueous suspensions may further contain substances that increase the viscosity of the suspension including, for example, sodium carboxymethylcellulose, sorbitol, and/or dextran. The suspension may also contain stabilizers. In some embodiments, a pharmaceutical formulation or composition of the present invention includes, but is not limited to, a solution, emulsion, microemulsion, foam, or liposome-containing formulation (e.g., cationic or noncationic liposomes).

[0204] The pharmaceutical composition or formulation of the present invention may comprise one or more penetration enhancer, carrier, excipient, or other active or inactive ingredients as appropriate and well known to those of skill in the art or described in the published literature. In some embodiments, liposomes also include sterically stabilized liposomes, e.g., liposomes comprising one or more specialized lipids. These specialized lipids result in liposomes with enhanced circulation lifetimes. In some embodiments, a sterically stabilized liposome comprises one or more glycolipids or is derivatized with one or more hydrophilic polymers, such as a polyethylene glycol (PEG) moiety. In some embodiments, a surfactant is included in the pharmaceutical formulation or compositions. The use of surfactants in drug products, formulations, and emulsions is well known in the art. In some embodiments, the present invention employs a penetration enhancer to effect the efficient delivery of the ASO, e.g., to aid diffusion across cell membranes and/or enhance the permeability of a lipophilic drug. In some embodiments, the penetration enhancer is a surfactant, fatty acid, bile salt, chelating agent, or non-chelating nonsurfactant.

[0205] In some embodiments, the pharmaceutical formulation comprises multiple ASOs. In some embodiments, the ASO is administered in combination with another drug or therapeutic agent. In some embodiments, the ASO is administered with one or more agents capable of promoting penetration of the subject ASO across the blood-brain barrier by any method known in the art. For example, delivery of agents by administration of an adenovirus vector to motor neurons in muscle tissue is described in U.S. Pat. No. 6,632,427, “Adenoviral-vector-mediated gene transfer into medullary motor neurons,” incorporated herein by reference. Delivery of vectors directly to the brain, e.g., the striatum, the thalamus, the hippocampus, or the substantia nigra, is described, e.g., in U.S. Pat. No. 6,756,523, “Adenovirus vectors for the transfer of foreign genes into cells of the central nervous system particularly in brain,” incorporated herein by reference.

[0206] In some embodiments, the ASOs are linked or conjugated with agents that provide desirable pharmaceutical or pharmacodynamic properties. In some embodiments, the ASO is coupled to a substance, known in the art to promote penetration or transport across the blood-brain barrier, e.g., an antibody to the transferrin receptor. In some embodiments, the ASO is linked with a viral vector, e.g., to render the antisense compound more effective or increase transport across the blood-brain barrier. In some embodiments, osmotic blood brain barrier disruption is assisted by infusion of sugars, e.g., meso erythritol, xylitol, D(+) galactose, D(+) lactose, D(+) xylose, dulcitol, myo-inositol, L(−) fructose, D(−) mannitol, D(+) glucose, D(+) arabinose, D(−) arabinose, cellobiose, D(+) maltose, D(+) raffinose, L(+) rhamnose, D(+) melibiose, D(−) ribose, adonitol, D(+) arabitol, L(−) arabitol, D(+) fucose, L(−) fucose, D(−) lyxose, L(+) lyxose, and L(−) lyxose, or amino acids, e.g., glutamine, lysine, arginine, asparagine, aspartic acid, cysteine, glutamic acid, glycine, histidine, leucine, methionine, phenylalanine, proline, serine, threonine, tyrosine, valine, and taurine. Methods and materials for enhancing blood brain barrier penetration are described, e.g., in U.S. Pat. No. 4,866,042, “Method for the delivery of genetic material across the blood brain barrier,” U.S. Pat. No. 6,294,520, “Material for passage through the blood-brain barrier,” and U.S. Pat. No. 6,936,589, “Parenteral delivery systems,” each incorporated herein by reference.

[0207] In some embodiments, the ASOs of the invention are chemically linked to one or more moieties or conjugates, e.g., a targeting moiety or other conjugate that enhances the activity or cellular uptake of the oligonucleotide. Such moieties include, but are not limited to, a lipid moiety, e.g., as a cholesterol moiety, a cholesteryl moiety, an aliphatic chain, e.g., dodecandiol or undecyl residues, a polyamine or a polyethylene glycol chain, or adamantane acetic acid. Oligonucleotides comprising lipophilic moieties and preparation methods have been described in the published literature. In some embodiments, the ASO is conjugated with a moiety including, but not limited to, an abasic nucleotide, a polyether, a polyamine, a polyamide, a peptide, a carbohydrate, e.g., N-acetylgalactosamine (GalNAc), N—Ac-Glucosamine (GluNAc), or mannose (e.g., mannose-6-phosphate), a lipid, or a polyhydrocarbon compound. Conjugates can be linked to one or more of any nucleotides comprising the ASO at any of several positions on the sugar, base or phosphate group, as understood in the art and described in the literature, e.g., using a linker. Linkers can include a bivalent or trivalent branched linker. In some embodiments, the conjugate is attached to the 3′ end of the ASO. Methods of preparing oligonucleotide conjugates are described, e.g., in U.S. Pat. No. 8,450,467, “Carbohydrate conjugates as delivery agents for oligonucleotides,” incorporated by reference herein.

### Treatment of Subjects

[0208] Any of the compositions provided herein may be administered to an individual. An “individual” may be used interchangeably with a “subject” or a “patient.” An individual may be a mammal, for example, a human or animal such as a non-human primate, a rodent, a rabbit, a rat, a mouse, a horse, a donkey, a goat, a cat, a dog, a cow, a pig, or a sheep. In some embodiments, the individual is a human. In some embodiments, the individual is a fetus, an embryo, or a child. In some embodiments, the individual is a non-human animal. In other embodiments, the individual may be another eukaryotic organism, such as a plant. In some embodiments, the compositions provided herein are administered to a cell ex vivo. In some embodiments, the compositions provided herein are administered to an organ or a tissue ex vivo (e.g., by perfusion or other means) prior to transplantation of the organ or the tissue.

[0209] In some embodiments, the compositions provided herein are administered to an individual as a method of treating a disease or a disorder. In some embodiments, the individual has an autoimmune or inflammatory disease, such as any of the diseases described herein. In some embodiments, the individual is at risk of having a disease, such as any of the diseases described herein. In some embodiments, the individual is at an increased risk of having a disease or a disorder caused by insufficient amount of a protein or insufficient activity of a protein. If an individual is “at an increased risk” of having a disease or a disorder caused insufficient amount of a protein or insufficient activity of a protein, the method involves preventative or prophylactic treatment. For example, an individual may be at an increased risk of having such a disease or a disorder because of family history of the disease. Typically, individuals at an increased risk of having such a disease or a disorder benefit from prophylactic treatment (e.g., by preventing or delaying the onset or progression of the disease or disorder). In some embodiments, the individual is at an increased risk of having a disease or a disorder caused by aberrant amount of a protein or aberrant activity of a protein.

[0210] In some embodiments, a subject treated using the methods and compositions of the invention has received prior treatment for a disease or a disorder (e.g., an immune disease or an immune disorder). Prior treatment may include, e.g., corticosteroids, transplant drugs such as cyclophosphamide and azathioprine, targeted biologics including mAbs blocking TNF, IL-17, IL-12/23 or directed against CD20 (rituximab) or CD52 (alemtuzumab), cytokines including IFN-0, small molecules like dimethyl fumarate and JAK or sphingosine 1 phosphate inhibitors, or intravenous immunoglobulin. In some embodiments, the methods of the present invention are used concurrently with or following other treatments.

[0211] In general, suitable routes for administration of ASOs of the present invention will vary depending on the cell type to which delivery of the ASOs is desired. As known to those of skill in the art and described in the literature, different tissues and organs can be affected by disorders (e.g., immune disorders), depending on the disorder and the affected individual. In some embodiments, the ASOs of the present invention are administered to patients parenterally. In some embodiments, the ASOs of the present invention are administered to patients by intracerebroventricular injection, intraperitoneal injection, intramuscular injection, intrathecal injection, subcutaneous injection, oral administration, synovial injection, intravitreal administration, subretinal injection, topical application, implantation, or intravenous injection. In some embodiments, a fetus is treated in utero, e.g., by administering the ASO composition to the fetus directly or indirectly (e.g., via the mother).

[0212] In some embodiments, a subject having an immune disorder affecting the brain or CNS, e.g., an autoimmune disorder such as multiple sclerosis, is treated by intrathecal injection, by intracerebroventricular injection, by subcutaneous administration, or by intravenous administration. A subject having an immune disorder affecting the bowel, e.g., an inflammatory disorder such as inflammatory bowel disease, is treated with an oral or subcutaneous administration of the present invention. In some embodiments, inflammatory conditions affecting the liver or kidney inflammation are treated with a subcutaneous or intravenous administration of the present invention. In some embodiments, joint inflammation, e.g., rheumatoid or psoriatic arthritis, is treated with a direct synovial injection or topical administration of the present invention. In some embodiments, inflammation of the skin, e.g., in a subject having psoriasis, is treated with a topical administration of the present invention. In some embodiments, inflammation of the eye, e.g., following corneal transplant or in uveitis, is treated with a topical or intravitreal or subretinal or implant administration of the present invention. In some embodiments, a subject having lupus is treated by subcutaneous administration of the present invention. In some embodiments, the mode of administration is selected to achieve tissue specificity, that is, to upregulate the target protein level (e.g., PD-L1) in target tissue, to minimize the potential for suppression of anti-pathogen immunity. In some embodiments, the appropriate mode of administration is selected by one of skill in the art based on the available literature and his or her knowledge of the given condition.

[0213] In some embodiments, the methods and compositions of the present invention are used in combination with an immunosuppressive therapy. An immunosuppressive therapy can comprise any treatment that suppresses the immune system. Immunosuppressive therapy can help to alleviate, minimize, or eliminate transplant rejection in a recipient. For example, immunosuppressive therapy can comprise an immuno-suppressive drug. Immunosuppressive drugs that can be used before, during and/or after transplant, include, e.g., MMF (mycophenolate mofetil (Cellcept)), ATG (anti-thymocyte globulin), anti-CD154 (CD40L), anti-CD40 (2C10, ASKP1240, CCFZ533X2201), alemtuzumab (Campath), anti-CD20 (rituximab), anti-IL-6R antibody (tocilizumab, Actemra), anti-IL-6 antibody (sarilumab, olokizumab), CTLA4-Ig (Abatacept/Orencia), belatacept (LEA29Y), sirolimus (Rapimune), everolimus, tacrolimus (Prograf), daclizumab (Ze-napax), basiliximab (Simulect), infliximab (Remicade), cyclosporin, deoxyspergualin, soluble complement receptor 1, cobra venom factor, compstatin, anti C5 antibody (eculizumab/Soliris), methylprednisolone, FTY720, everolimus, leflunomide, anti-IL-2R-Ab, rapamycin, anti-CXCR3 antibody, anti-ICOS antibody, anti-OX40 antibody, and anti-CD122 antibody. In some embodiments, more than one immunosuppressive agent or drug is used together or sequentially. Immunosuppression can also be achieved using non-drug regimens including, but not limited to, whole body irradiation, thymic irradiation, and full and/or partial splenectomy. These techniques can also be used in combination with one or more immuno-suppressive drugs in conjunction with the methods and compositions of the invention, as appropriate.

Methods of Identifying Additional ASOs that Modulate Splicing

[0214] Also, within the scope of the present invention are methods for identifying (determining) additional ASOs that modulate (e.g., inhibit or enhance) splicing of a AIC pre-mRNA, specifically of the alternative-intron. In some embodiments, the target AIC pre-mRNA is encoded by a gene selected from: ARHGAP23, BRD1, DCHS1, EPB41L2, GPX8, HIVEP3, INVS, KIAA0319, NAIP, CD274, PTCH2, PTPRZ1, SON, ZCCHC2. In some embodiments, within the scope of the present invention are methods for identifying (determining) additional ASOs that modulate (e.g., inhibit or enhance) splicing of a CD274 AIC pre-mRNA, specifically of the alternative-intron. ASOs that specifically hybridize to different nucleotides within the target region of the pre-mRNA may be screened to identify (determine) ASOs that modulate (e.g., impair or improve) the rate and/or extent of splicing of the alternative-intron. In some embodiments, the ASO may promote the binding of a splicing repressor(s)/silencer. In some embodiments, the ASO may block or interfere with the binding site(s) of a splicing repressor(s)/silencer. Any method known in the art may be used to identify (determine) an ASO that when hybridized to the target region of the pre-mRNA results in the desired effect (e.g., enhanced protein or functional RNA production). These methods also can be used for identifying ASOs that modulates splicing of the alternative-intron by binding to a targeted region in an intron upstream of a first portion of an exon flanking the 5′ splice site of the alternative-intron, in an intron downstream of a second portion of the exon flanking the 3′ splice site of the alternative-intron, in the first portion of the exon, in the second portion of the exon, or in the alternative-intron. An example of a method that may be used is provided below.

[0215] A round of screening, referred to as an ASO “walk” may be performed using ASOs that have been designed to hybridize to a target region of a pre-mRNA. For example, the ASOs used in the ASO walk can be tiled every 5 nucleotides from approximately 100 nucleotides upstream of the 5′ splice site of the alternative-intron (e.g., a portion of sequence of the exon located upstream of the target intron or alternative-intron or a portion of a sequence of a first portion of an exon flanking 5′ splice site of the alternative-intron) to approximately 100 nucleotides downstream of the 5′ splice site of the alternative-intron and/or from approximately 100 nucleotides upstream of the 3′ splice site of the alternative-intron to approximately 100 nucleotides downstream of the 3′ splice site of the alternative-intron (e.g., aportion of sequence of the exon located downstream of the target intron or alternative-intron or a portion of sequence of a second portion of the exon flanking 3′ splice site of the alternative-intron). For example, a first ASO of 15 nucleotides in length may be designed to specifically hybridize to nucleotides +1 to +15 relative to the 5′ splice site of the alternative-intron. A second ASO is designed to specifically hybridize to nucleotides +6 to +20 relative to the 5′ splice site of the alternative-intron. ASOs are designed as such spanning the target region of the pre-mRNA. In some embodiments, the ASOs can be tiled more closely, e.g., every 1, 2, 3, or 4 nucleotides. Further, the ASOs can be tiled from 100 nucleotides downstream of the 5′ splice site, to 100 nucleotides upstream of the 3′ splice site.

[0216] One or more ASOs or a control ASO (an ASO with a scrambled sequence, sequence that is not expected to hybridize to the target region) are delivered, for example by transfection, into a disease-relevant cell line that expresses the target pre-mRNA (e.g., the AIC pre-mRNA described elsewhere herein). The splicing-modulating effects (e.g., splicing-inhibiting effects or splicing-inducing effects) of each of the ASOs may be assessed by any method known in the art, for example, by reverse transcriptase (RT)-PCR using primers that span the splice junction. An increase in the RT-PCR product produced using the primers spanning the splice junction in ASO-treated cells as compared to in control ASO-treated cells indicates that splicing of the target intron has been inhibited. A reduction or absence of the RT-PCR product produced using the primers spanning the splice junction in ASO-treated cells as compared to in control ASO-treated cells indicates that splicing of the target intron has been enhanced. RT-PCR may also use primers that flank the splice junction, as described in Example 2. RT-PCR products may be of different sizes, due to the absence or presence of a splicing event or due to a change or an addition of a splice junction. For example, the presence of a smaller RT-PCR product may indicate that an additional splicing event took place or that a splicing event occurred at a different position. The smaller RT-PCR product may indicate that an alternative-intron was spliced out.

[0217] In some embodiments, the splicing efficiency, the ratio of spliced to unspliced pre-mRNA, the rate of splicing, or the extent of splicing may be modulated (e.g., impaired or improved) using the ASOs described herein. The amount of protein or functional RNA that is encoded by the target pre-mRNA can also be assessed to determine whether each ASO achieved the desired effect (e.g., enhanced protein production). Any method known in the art for assessing and/or quantifying RNA or protein production, such as qPCR, RT-PCR, Western blotting, flow cytometry, immunofluorescence microscopy, and ELISA, can be used.

[0218] A second round of screening, referred to as an ASO “micro-walk” may be performed using ASOs that have been designed to hybridize to a target region of a pre-mRNA. The ASOs used in the ASO micro-walk are tiled every 1 nucleotide to further refine the nucleotide acid sequence of the pre-mRNA that when hybridized with an ASO results in modulated (e.g., inhibited or enhanced) splicing.

[0219] Regions defined by ASOs that inhibit or promote splicing of the target intron are explored in greater detail by means of an ASO “micro-walk”, involving ASOs spaced in 1-nucleotide steps, as well as longer ASOs, typically 18-25 nucleotides.

[0220] As described for the ASO walk above, the ASO micro-walk is performed by delivering one or more ASOs, or a control ASO (an ASO with a scrambled sequence, sequence that is not expected to hybridize to the target region), for example by transfection, into a disease-relevant cell line that expresses the target pre-mRNA. The splicing-inhibiting effects or splicing-inducing effects of each of the ASOs may be assessed by any method known in the art, for example, by reverse transcriptase (RT)-PCR using primers that span the splice junction. An increase in the RT-PCR product produced using the primers spanning the splice junction in ASO-treated cells as compared to in control ASO-treated cells indicates that splicing of the target intron has been inhibited. A reduction or absence of the RT-PCR product produced using the primers spanning the splice junction in ASO-treated cells as compared to in control ASO-treated cells indicates that splicing of the target intron has been enhanced. RT-PCR may also use primers that flank the splice junction, as described in Example 2. RT-PCR products may be of different sizes, due to the absence or presence of a splicing event or due to a change or a addition of a splice junction. For example, the presence of a smaller RT-PCR product may indicate that an additional splicing event took place or that a splicing event occurred at a different position. The smaller RT-PCR product may indicate that an alternate-intron was spliced. In some embodiments, the splicing efficiency, the ratio of spliced to unspliced pre-mRNA, the rate of splicing, or the extent of splicing may be modulated (e.g., impaired or improved) using the ASOs described herein. The amount of protein or functional RNA that is encoded by the target pre-mRNA can also be assessed to determine whether each ASO achieved the desired effect (e.g., enhanced protein production). Any method known in the art for assessing and/or quantifying RNA or protein production, such as qPCR, RT-PCR, Western blotting, flow cytometry, immunofluorescence microscopy, and ELISA, can be used.

[0221] ASOs that when hybridized to a region of a pre-mRNA result in modulated splicing (e.g., inhibited or enhanced splicing) and protein production (e.g., increased or decreased protein production) may be tested in vivo using animal models, for example, transgenic mouse models in which the full-length human gene has been knocked-in or in humanized mouse models of disease. Suitable routes for administration of ASOs may vary depending on the disease and/or the cell types to which delivery of the ASOs is desired. ASOs may be administered, for example, by intracerebroventricular injection, intraperitoneal injection, intramuscular injection, intrathecal injection, subcutaneous injection, oral administration, synovial injection, intravitreal administration, subretinal injection, topical application, implant, or intravenous injection. Following administration, the cells, tissues, and/or organs of the model animals may be assessed to determine the effect of the ASO treatment by for example evaluating splicing (efficiency, rate, or extent) and protein production by methods known in the art and described herein. The animal models may also be any phenotypic or behavioral indication of the disease or disease severity.

[0222] While preferred embodiments of the present invention have been shown and described herein, it will be obvious to those skilled in the art that such embodiments are provided by way of example only. Numerous variations, changes, and substitutions will now occur to those skilled in the art without departing from the invention. It should be understood that various alternatives to the embodiments of the invention described herein may be employed in practicing the invention. It is intended that the following claims define the scope of the invention and that methods and structures within the scope of these claims and their equivalents be covered thereby.

### EXAMPLES

[0223] The present invention will be more specifically illustrated by the following Examples. However, it should be understood that the present invention is not limited by these examples in any manner.

### Example 1: Identification of Alternative-Introns in CD274 Transcripts by RNAseq Using Next Generation Sequencing

[0224] Whole transcriptome shotgun sequencing can be carried out using next generation sequencing to reveal a snapshot of transcripts produced by the CD274 gene to identify alternative-introns. For this purpose, polyA+ RNA from nuclear and cytoplasmic fractions of AST (human astrocyte) cells can be isolated and cDNA libraries constructed using Illumina's TruSeq Stranded mRNA library Prep Kit. The libraries can be pair-end sequenced that can result in 100-nucleotide reads and can be mapped to the human genome. The mapped reads are visualized using the UCSC genome browser (operated by the UCSC Genome Informatics Group (Center for Biomolecular Science & Engineering, University of California, Santa Cruz, 1156 High Street, Santa Cruz, Calif. 95064) and described by, e.g., Rosenbloom, et al., 2015, “The UCSC Genome Browser database: 2015 update,” Nucleic Acids Research 43, Database Issue, doi: 10.1093/nar/gkul 177) and the coverage and number of reads can be inferred by the peak signals. Based on the sequencing reads, Exon 4 in CD274 was identified as having a potential alternative-intron. A schematic of the alternative-intron construct is shown in FIG. 1. The mRNA sequence that encodes a functional protein is labeled as 110. Sequence 110 is composed of 3 exons, 101, 103-105, and 107. The intron 102 and 106 are spliced out and are not part of construction 110. However, an alternate form of the mRNA, labeled as 120, may be generated and results in a premature termination codon (PTC) and therefore does not encode a functional protein. This alternate mRNA is instead composed of 101, 103, 105 and 107, where 104 (which is part of the exon of construct 110) is spliced out as a “alternative-intron”.

### Example 2: In Vitro Observation of Alternative-Intron in Exon 4

[0225] PCR primers are designed with homology to exon 4 and exon 6 and a RT-PCR reaction is performed to generate amplicons pertaining mRNA transcripts in Huh7 cells. An amplification reaction is run using total RNA (labeled T), and RNA from fractionated cells corresponding to the nucleus (labeled N) and the cytoplasm (labeled C) to generate amplicons of mRNA transcripts. The amplicons are run on an polyacrylamide gel and intensities of the different PCR products can be observed. The product that results from the removal of the “alternate intron” (a.i.) is observed to be lower on the gel and of a smaller size than the product corresponding to the the full-length functional mRNA transcript (labeled as can). To visualize the level of the a.i. removal, cells were treated with cycloheximide (CHX) or DMSO control. CHX, a translation inhibitor, inhibits nonsense-mediated mRNA decay which normally degrades the mRNA lacking the alternative intron, as the removal of the a.i. leads to the introduction of a PTC. FIG. 2A shows the gel as well as a schematic of the can and a.i. products. FIG. 2B show the percent abundance of the product resulting from removal of the a.i. relative to total (can+a.i.). FIG. 2C shows the gel, schematics and percent abundance of the product resulting from removal of the a.i. relative to total in two human cell lines (ARPE-19, and HUVEC) and non-human primate retinas (cyno retina).

### Example 3: Design of ASO-Walk Targeting Exon 4 of CD274

[0226] An ASO walk was designed to target exon 4. (SEQ ID NOs:1-67). A region spanning nucleotides +68 to +253 was targeted with 2′-O-MOE RNA, PS backbone, 18-mer ASOs shifted by 5-nucleotide intervals. FIG. 3 shows this ASO walk, with each black box indicating the span of an ASO and the sequence indicated underneath the black block indicating the target sequence in exon 4. Each block spans 18 nucleotides, representing an ASO of 18 nucleotides, and starts 5 nucleotides apart, representing the “walk” of 5-nucleotide intervals.

### Example 4: Screening of ASO-Walk Targeting Exon 4 of CD274

[0227] ASOs from example 3 were screened using ARPE-19 cells. ASOs were transfected in ARPE-19 cells for 24 hrs using 80 nM of ASOs depicted in FIG. 3. RT-PCR products were amplified using primers in exon 4 and exon 6 and run on a polyacrylamide gel. FIG. 4A shows a higher band corresponding to the full length can mRNA, and a lower band corresponding to the shorter a.i. mRNA. FIG. 4B shows the quantification of RT-PCR products plotted as a percentage of the alternative intron (a.i./(can+a.i.)*100) ASOs were denoted as possible candidate when the relative abundance of a.i was decreased. Treatment with ASO 34, for example, correlates to a decreased relative abundance compared to a control (mock). FIG. 4C shows Taqman qPCR analysis using RNA from samples in panel A. The Taqman probe is positioned over the exon 3-exon 4 junction. As observed, CD247 mRNA expression has a general inverse correlation with the relative abundance of the a.i. transcript. ASO 34, for example, show an increase in CD247 expression compared to control.

### Example 5: Measuring ASO Activity

[0228] The selected ASO was transfected in Huh7 cells for 21 hr using 80 nM of ASO. Multiple assays were used to determine general activity of the selected ASO. FIG. 5A shows RT-PCR using RNA from Huh7 cells transfected for 21 hours with a selected 80 nM ASO, followed by 3 hours of cycloheximide treatment. Primers were positioned in exons 4 and 6. FIG. 5B shows quantification of RT-PCR products plotted as a percentage of the alternative intron (a.i./(can+a.i.)*100) ASO 34 led to a reduction in the amount of the a.i. product. This is observed in FIG. 5B with the intensity of the band corresponding to a.i. is less in the ASO 34 transfected cells compared to the mock-transfected cells. FIG. 5C shows TaqMan qPCR analysis using RNA from Huh7 cells transfected for 24 hours was used to quantify the activity of 80 nM of ASO compared to a mock. The TaqMan qPCR probe was positioned over the exon 3-4 junction. Results show a higher relative abundance of full length can mRNA in ASO 34 transfected cells as compared to the mock transfected cells. FIG. 5D shows the mean fluorescent intensity of a flow cytometry analysis of Huh7 cells transfected for 5 days with 80 nM ASO 34 plotted as fold change over control (mock) to quantify the expression of PD-L1 protein.

TABLE 2
CD274 Target Sequences

| SEQ ID NO. | REFERENCE |
|---|---|
| 68 | CD274 Exon 4 |
| 69 | CD274 mRNA NCBI Reference Sequence: NM_014143.3 |
| 70 | CD274 Amino Acid Sequence UniProtKB/ |
| | Swiss-Prot: Q9NZQ7-1 |
| 71 | CD274 Genomic Sequence ENST00000381577.3 range = chr9: 5450525-5470547 |
| 72 | CD247 Pre-mRNA sequence hg38_knownGene_ENST00000381573.8 range = chr9: 5450503- |
| | 5470566 |
| 73 | CD247 Pre-mRNA sequence hg38_knownGene_ENST00000381577.3 range = chr9: 5450525- |
| | 5470547 |
| 74 | CD247 Pre-mRNA sequence hg38_knownGene_ENST00000498261.1 range = chr9: 5456114- |
| | 5467866 |
| 75 | CD247 Pre-mRNA sequence hg38_knownGene_ENST00000474218.1 range = chr9: 5457384- |
| | 5463238 |
| 76 | CD247 Pre-mRNA sequence hg38_knownGene_ENST00000492923.1 range = chr9: 5462935- |
| | 5465912 |

### Example 6: Alternative Introns in Various Gene Transcripts

[0229] Whole transcriptome shotgun sequencing can be carried out using next generation sequencing to reveal a snapshot of transcripts produced by genes to identify alternative-introns. Cells can be isolated and cDNA libraries constructed using Illumina's TruSeq Stranded mRNA library Prep Kit as also described in Example 1. The libraries can be analyzed and based on the sequencing reads, exons in other genes can be identified as having a potential alternative-intron.

An ASO walk can be designed to target exons identified using 2′-O-MOE RNA, PS backbone, 18-mer ASOs shifted by 5-nucleotide intervals similar to Example 3. An ASO can then be validated via the exemplary screening method of Example 4 and then can be used to prevent or promote de inclusion of an alternate intron event in an mRNA transcript. ASO can be further injected into mouse models to confirm activity and increased expression. Various animal disease models may be used to validate increased expression of the target protein. Table 3 provides some examples of genes that can be targeted in the manner explained above. Genes listed in Table 3 have been known to comprise alternative introns. Chromosomal coordinates of the genes have been provided in addition to the targeted exon. Table 3 also lists some exemplary diseases that may be treated by the increased expression of the genes. Sequences and chromosomal coordinates provided in Table 3 have been generated from the GRCh38/hg38 assembly.

TABLE 3
List of exemplary genes, corresponding target alternative introns, exons, exemplary
corresponding ASOs and diseases to be treated.

| | | | | | Coordinates of | | | | |
|---|---|---|---|---|---|---|---|---|---|
| | | | | | Exon where | | | Exem- | |
| | | | | | Alternative intron | | | plary | |
| | Alternative intron coordinates | | | | is located | | | ASO | Exemplary |
| | | | | SEQ | | SEQ | | SEQ | Diseases to be |
| | | | | ID | | ID | | ID | treated using the |
| Gene | Chrm | Start | End | NO: | Start: End | NO: | Strand | Nos | ASOs |
| ARHGAP23 | chr17 | 38477706 | 38477827 | 77 | 38477579: | 91 | + | 105- | Sclerocystic |
| | | | | | 38477896 | | | 153 | Ovaries; |
| | | | | | | | | | Polycystic Ovary |
| | | | | | | | | | Syndrome |
| BRD1 | chr22 | 49787495 | 49787576 | 78 | 49787390: | 92 | − | 154- | Schizophrenia; |
| | | | | | 49787887 | | | 217 | Bipolar Disorder; |
| | | | | | | | | | Adenoid Cystic |
| | | | | | | | | | Carcinoma |
| DCHS1 | chr11 | 6627026 | 6627254 | 79 | 6626789: | 93 | − | 218- | Van |
| | | | | | 6627667 | | | 334 | Maldergem |
| | | | | | | | | | Wetzburger |
| | | | | | | | | | Verloes |
| | | | | | | | | | syndrome; |
| | | | | | | | | | Mitral Valve |
| | | | | | | | | | Prolapse, |
| | | | | | | | | | Myxomatous |
| | | | | | | | | | 2; Colorectal |
| | | | | | | | | | Cancer; |
| | | | | | | | | | Heterotopia, |
| | | | | | | | | | Periventricular, |
| | | | | | | | | | Autosomal |
| | | | | | | | | | Recessive; |
| | | | | | | | | | Familial |
| | | | | | | | | | mitral valve |
| | | | | | | | | | prolapse |
| EPB41L2 | chr6 | 130869945 | 130870038 | 80 | 130869563: | 94 | − | 335- | Liver Cirrhosis |
| | | | | | 130870126 | | | 406 | |
| GPX8 | chr5 | 55160244 | 55160329 | 81 | 55160169: | 95 | + | 407- | Liver Cirrhosis |
| | | | | | 55160396 | | | 443 | |
| HIVEP3 | chr1 | 41579843 | 41580041 | 82 | 41579737: | 96 | − | 444- | Colorectal Cancer |
| | | | | | 41585318 | | | 1027 | |
| INVS | chr9 | 100292874 | 100292946 | 83 | 100292326: | 97 | + | 1028- | Nephronophthisis |
| | | | | | 100293043 | | | 1112 | 2; Cholestasis; |
| | | | | | | | | | Infantile |
| | | | | | | | | | Cholestasis; Renal |
| | | | | | | | | | dysplasia and |
| | | | | | | | | | retinal aplasia |
| | | | | | | | | | (disorder) |
| KIAA0319 | chr6 | 24596241 | 24596436 | 84 | 24595873: | 98 | − | 1113- | Alexia; |
| | | | | | 24596618 | | | 1212 | Developmental |
| | | | | | | | | | reading disorder; |
| | | | | | | | | | Dyslexia |
| NAIP | chr5 | 70983973 | 70984696 | 85 | 70983775: | 99 | − | 1213- | Muscular |
| | | | | | 70985886 | | | 1501 | Atrophy, Spinal, |
| | | | | | | | | | Type II; Muscular |
| | | | | | | | | | atrophy, spinal, |
| | | | | | | | | | infantile chronic |
| | | | | | | | | | form; Hereditary |
| | | | | | | | | | Motor Neuropathy |
| | | | | | | | | | Proximal Type I; |
| | | | | | | | | | Juvenile Spinal |
| | | | | | | | | | Muscular Atrophy |
| PTCH2 | chr1 | 44827490 | 44827577 | 86 | 44827402: | 100 | − | 1502- | Medulloblastoma; |
| | | | | | 44827714 | | | 1547 | Pigmented Basal |
| | | | | | | | | | Cell Carcinoma; |
| | | | | | | | | | Gastrointestinal |
| | | | | | | | | | Stromal Sarcoma; |
| | | | | | | | | | Oculo-dento- |
| | | | | | | | | | digital syndrome; |
| | | | | | | | | | Medullomyoblastoma; |
| | | | | | | | | | Basal cell |
| | | | | | | | | | carcinoma; |
| | | | | | | | | | Childhood |
| | | | | | | | | | Medulloblastoma; |
| | | | | | | | | | Macrostomia; |
| | | | | | | | | | Desmoplastic |
| | | | | | | | | | Medulloblastoma; |
| | | | | | | | | | Hydrocephalus; |
| | | | | | | | | | Adult |
| | | | | | | | | | Medulloblastoma; |
| | | | | | | | | | Melanotic |
| | | | | | | | | | medulloblastoma; |
| | | | | | | | | | Basal Cell Nevus |
| | | | | | | | | | Syndrome |
| PTPRZ1 | chr7 | 122011310 | 122012607 | 87 | 122010334: | 101 | + | 1548- | Schizophrenia; |
| | | | | | 122013889 | | | 2039 | Pneumoconiosis; |
| | | | | | | | | | Bagassosis |
| SON | chr21 | 33551290 | 33552247 | 88 | 33549476: | 102 | + | 2040- | Malignant |
| | | | | | 33555391 | | | 2733 | neoplasm of |
| | | | | | | | | | salivary gland; |
| | | | | | | | | | ZTTK Syndrome; |
| | | | | | | | | | Adenoid Cystic |
| | | | | | | | | | Carcinoma |
| SON | chr21 | 33551290 | 33552559 | 89 | 33549476: | 103 | + | 2734- | Malignant |
| | | | | | 33555391 | | | 3458 | neoplasm of |
| | | | | | | | | | salivary gland; |
| | | | | | | | | | ZTTK Syndrome; |
| | | | | | | | | | Adenoid Cystic |
| | | | | | | | | | Carcinoma |
| ZCCHC2 | chr18 | 62574927 | 62575312 | 90 | 62574057: | 104 | + | 3459- | Influenza |
| | | | | | 62575550 | | | 3651 | |

[0230] While preferred embodiments of the present disclosure have been shown and described herein, it will be obvious to those skilled in the art that such embodiments are provided by way of example only. Numerous variations, changes, and substitutions will now occur to those skilled in the art without departing from the disclosure. It should be understood that various alternatives to the embodiments of the disclosure described herein may be employed in practicing the disclosure. It is intended that the following claims define the scope of the disclosure and that methods and structures within the scope of these claims and their equivalents be covered thereby.

1-120. (canceled)

121. A method of modulating expression of a target protein or a target RNA by cells having an alternative-intron-containing pre-mRNA (AIC pre-mRNA), the AIC pre-mRNA comprising an alternative-intron, a first portion of an exon flanking a 5′ splice site of the alternative-intron, a second portion of the exon flanking a 3′ splice site of the alternative-intron, the method comprising contacting the cells with a therapeutic agent or a vector encoding the therapeutic agent,
wherein the therapeutic agent binds to a targeted region of the AIC pre-mRNA encoding the target protein or the target RNA, whereby splicing of the alternative-intron from the AIC pre-mRNA encoding the target protein or the target RNA is modulated, thereby modulating a level of processed mRNA encoding the target protein or the target RNA, and modulating expression of the target protein or the target RNA in the cells.

122. The method of claim 121, wherein the therapeutic agent inhibits exclusion of the alternative-intron from the AIC pre-mRNA and increases a level of a processed mRNA that comprises the alternative-intron, the first portion of the exon and the second portion of the exon, thereby increasing expression of the target protein or the target RNA in the cells.

123. The method of claim 121, wherein the therapeutic agent decreases splicing of the alternative-intron from the AIC pre-mRNA, thereby increasing a level of the processed mRNA encoding the target protein or the target RNA and increasing expression of the target protein or the target RNA in the cells.

124. The method of claim 121, wherein at least a portion of the targeted region of the AIC pre-mRNA is within the alternative-intron, at least a portion of the targeted region of the AIC pre-mRNA is within the first portion of the exon, and/or at least a portion of the targeted region of the AIC pre-mRNA is within the second portion of the exon.

125. The method of claim 121, wherein the target protein expressed from the processed mRNA is a full-length protein and/or a fully functional protein, or wherein the target RNA expressed from the processed mRNA is a fully functional RNA.

126. The method of claim 121, wherein splicing of the alternative-intron from the AIC pre-mRNA encoding the target protein or the target RNA produces a processed mRNA with a premature termination codon (PTC) and/or that undergoes non-sense mediated decay (NMD).

127. The method of claim 121, wherein splicing of the alternative-intron from the AIC pre-mRNA encoding the target protein or the target RNA produces a processed mRNA that encodes a non-functional target protein or a non-functional target RNA

128. The method of claim 121, wherein:
(a) the AIC pre-mRNA is a CD274 pre-mRNA and the target protein is PD-L1 (CD274),
(b) the AIC pre-mRNA is a ARHGAP23 pre-mRNA and the target protein is rho GTPase activating protein 23,
(c) the AIC pre-mRNA is a BRD1 pre-mRNA and the target protein is bromodomain containing 1 protein,
(d) the AIC pre-mRNA is a DCHS1 pre-mRNA and the target protein is protocadherin-16 protein,
(e) the AIC pre-mRNA is a EPB41L2 pre-mRNA and the target protein is band 4.1-like protein 2,
(f) the AIC pre-mRNA is a GPX8 pre-mRNA and the target protein is glutathione peroxidase 8,
(g) the AIC pre-mRNA is a HIVEP3 pre-mRNA and the target protein is human immunodeficiency virus type I enhancer-binding protein 3,
(h) the AIC pre-mRNA is a INVS pre-mRNA and the target protein is inversin,
(i) the AIC pre-mRNA is a KIAA0319 pre-mRNA and the target protein is dyslexia-associated protein KIAA0319 protein,
(j) the AIC pre-mRNA is a NAIP pre-mRNA and the target protein is NLR family apoptosis inhibitory protein,
(k) the AIC pre-mRNA is a PTCH2 pre-mRNA and the target protein is protein patched homolog 2,
(l) the AIC pre-mRNA is a PTPRZ1 pre-mRNA and the target protein is protein tyrosine phosphatase receptor type Z1,
(m) the AIC pre-mRNA is a SON pre-mRNA and the target protein is SON, or
(n) the AIC pre-mRNA is a ZCCHC2 pre-mRNA and the target protein is zinc finger CCHC domain-containing protein 2.

129. The method of claim 121, wherein the targeted region of the AIC pre-mRNA to which the therapeutic agent binds is located within exon 4 of a CD274 pre-mRNA.

130. The method of claim 121, wherein the method comprises contacting the cell with the vector encoding the therapeutic agent, and wherein the vector is a viral vector.

131. The method of claim 121, wherein the method comprises contacting the cell with the therapeutic agent, and wherein the therapeutic agent is an antisense oligomer (ASO).

132. The method of claim 131, wherein the antisense oligomer comprises a backbone modification, a modified sugar moiety, or both.

133. The method of claim 131, wherein the pre-mRNA is an CD274 pre-mRNA, and wherein the antisense oligomer has a sequence that is complementary to a sequence with at least 80% sequence identity to a sequence selected from the group consisting of SEQ ID NO: 68.

134. The method of claim 131, wherein the pre-mRNA is an CD274 pre-mRNA, and wherein the antisense oligomer has a sequence with at least about 80% sequence identity to a sequence selected from the group consisting of SEQ ID NOs: 1-67.

135. The method of claim 128, wherein the pre-mRNA is an CD274 pre-mRNA, and wherein the CD274 pre-mRNA comprises a sequence with at least 80% sequence identity to a sequence selected from the group consisting of SEQ ID NOs: 72-76.

136. The method of claim 128, wherein the pre-mRNA is an CD274 pre-mRNA, and wherein the targeted region is within a sequence with at least 80% sequence identity to a sequence selected from the group consisting of SEQ ID NO: 68.

137. The method of claim 128, wherein the pre-mRNA is an CD274 pre-mRNA, and wherein the targeted region of the pre-mRNA:
(a) comprises at least 10 contiguous nucleobases of SEQ ID NO: 68; or
(b) is within a sequence between a pair of genomic sites selected from the group consisting of GRCh38/hg38: chr9 5462900 and GRCh38/hg38: chr9 5463107.

138. The method of claim 128, wherein the targeted region of the pre-mRNA:
(a) overlaps with a junction of the intron upstream of the first portion of the exon and the first portion of the exon;
(b) overlaps with a junction of the first portion of the exon and the alternative-intron;
(c) overlaps with a junction of the alternative-intron and the second portion of the exon; or
(d) overlaps with a junction of the second portion of the exon and the intron downstream of the second portion of the exon.

139. The method of claim 128, wherein:
(a) the AIC pre-mRNA is a CD274 pre-mRNA, the target protein is PD-L1 (CD274), and the method treats a subject suffering from a disease or condition that comprises an immune disease or an immune disorder;
(b) the AIC pre-mRNA is a ARHGAP23 pre-mRNA, the target protein is rho GTPase activating protein 23, and the method treats a subject suffering from a disease or condition that comprises Sclerocystic Ovaries or Polycystic Ovary Syndrome;
(c) the AIC pre-mRNA is a BRD1 pre-mRNA, the target protein is bromodomain containing 1 protein, and the method treats a subject suffering from a disease or condition that comprises Schizophrenia, Bipolar Disorder, or Adenoid Cystic Carcinoma;
(d) the AIC pre-mRNA is a DCHS1 pre-mRNA, the target protein is protocadherin-16 protein, and the method treats a subject suffering from a disease or condition that comprises Van Maldergem Wetzburger Verloes syndrome, Myxomatous 2 Mitral Valve Prolapse, Colorectal Cancer, Autosomal Recessive Periventricular Heterotopia, or Familial mitral valve prolapse;
(e) the AIC pre-mRNA is a EPB41L2 pre-mRNA, the target protein is band 4.1-like protein 2, and the method treats a subject suffering from a disease or condition that comprises liver cirrhosis;
(f) the AIC pre-mRNA is a GPX8 pre-mRNA, the target protein is glutathione peroxidase 8, and the method treats a subject suffering from a disease or condition that comprises liver cirrhosis;
(g) the AIC pre-mRNA is a HIVEP3 pre-mRNA, the target protein is human immunodeficiency virus type I enhancer-binding protein 3, and the method treats a subject suffering from a disease or condition that comprises Colorectal cancer;
(h) the AIC pre-mRNA is a INVS pre-mRNA, the target protein is inversin, and the method treats a subject suffering from a disease or condition that comprises Nephronophthisis 2, Cholestasis, Infantile Cholestasis, Renal dysplasia, or retinal aplasia;
(i) the AIC pre-mRNA is a KIAA0319 pre-mRNA, the target protein is dyslexia-associated protein KIAA0319 protein, and the method treats a subject suffering from a disease or condition that comprises Alexia, Developmental reading disorder, or Dyslexia;
(j) the AIC pre-mRNA is a NAIP pre-mRNA, the target protein is NLR family apoptosis inhibitory protein, and the method treats a subject suffering from a disease or condition that comprises Spinal Muscular Atrophy Type II, infantile chronic form of spinal Muscular atrophy, Hereditary Motor Neuropathy Proximal Type I, or Juvenile Spinal Muscular Atrophy;
(k) the AIC pre-mRNA is a PTCH2 pre-mRNA, the target protein is protein patched homolog 2 and the method treats a subject suffering from a disease or condition that comprises Medulloblastoma, Pigmented Basal Cell Carcinoma, Gastrointestinal Stromal Sarcoma, Oculo-dento-digital syndrome, Medullomyoblastoma, Basal cell carcinoma, Childhood Medulloblastoma, Macrostomia, Desmoplastic Medulloblastoma, Hydrocephalus, Adult Medulloblastoma, Melanotic medulloblastoma, or Basal Cell Nevus Syndrome,
(l) the AIC pre-mRNA is a PTPRZ1 pre-mRNA, the target protein is protein tyrosine phosphatase receptor type Z1, and the method treats a subject suffering from a disease or condition that comprises Schizophrenia, Pneumoconiosis, or Bagassosis;
(m) the AIC pre-mRNA is a SONpre-mRNA, the target protein is SON, and the method treats a subject suffering from a disease or condition that comprises Malignant neoplasm of salivary gland, ZTTK Syndrome, or Adenoid Cystic Carcinoma; or
(n) the AIC pre-mRNA is a ZCCHC2 pre-mRNA, the target protein is zinc finger CCHC domain-containing protein 2, and the method treats a subject suffering from a disease or condition that comprises influenza.

140. A method of treating a disease or a condition in a subject in need thereof by modulating expression of a target protein or a target RNA in a cell of the subject, comprising: contacting a cell of the subject with a therapeutic agent or a vector encoding the therapeutic agent,
wherein the therapeutic agent modulates splicing of an alternative-intron from an alternative-intron-containing pre-mRNA (AIC pre-mRNA) encoding the target protein or the target RNA, wherein the AIC pre-mRNA comprises the alternative-intron, a first portion of an exon flanking a 5′ splice site of the alternative-intron, a second portion of the exon flanking a 3′ splice site of the alternative-intron,
wherein the therapeutic agent binds to a targeted region of the AIC pre-mRNA encoding the target protein or the target RNA, whereby splicing of the alternative-intron from the AIC pre-mRNA encoding the target protein or the target RNA is modulated, thereby modulating a level of processed mRNA encoding the target protein or the target RNA and modulating the expression of the target protein or the target RNA in the cell of the subject.

141. A composition comprising a therapeutic agent for use in a method of modulating expression of a target protein or a target RNA by cells to treat a disease or a condition in a subject in need thereof, associated with an aberrant protein or an aberrant RNA in the subject, wherein the aberrant protein or aberrant RNA is aberrant in amount or activity in the subject, wherein the therapeutic agent modulates splicing of an alternative-intron-containing pre-mRNA (AIC pre-mRNA) encoding the target protein or the target RNA,
wherein the target protein is:
(a) the aberrant protein;
(b) a protein which functionally activates or deactivates cellular signaling mechanisms to alter cellular activity associated with the disease or condition;
(c) a protein which functionally augments or replaces the aberrant protein in the subject; or
(d) a protein which functionally decreases or inhibits the aberrant protein in the subject;
and wherein the target RNA is:
(a) the aberrant RNA;
(b) an RNA which functionally activates or deactivates cellular signaling mechanisms to alter cellular activity associated with the disease or condition;
(c) an RNA which functionally augments or replaces the aberrant RNA in the subject; or
(d) an RNA which functionally decreases or inhibits the aberrant RNA in the subject;
wherein the AIC pre-mRNA comprising an alternative-intron, a first portion of an exon flanking a 5′ splice site of the alternative-intron, a second portion of the exon flanking a 3′ splice site of the alternative-intron, and whereby splicing of the alternative-intron from the AIC pre-mRNA encoding the target protein or the target RNA is modulated, thereby modulating production or activity of the target protein or the target RNA in the subject.

The application's sequence listing, which the Patent Office published only in electronic form, follows.

SEQUENCE LISTING (3651 sequences)

SEQ ID NO: 1 - DNA, 18 bp, Artificial Sequence
  Description of Artificial Sequence: Synthetic oligonucleotide
tagccctcagcctgacat

SEQ ID NO: 2 - DNA, 18 bp, Artificial Sequence
  Description of Artificial Sequence: Synthetic oligonucleotide
tgggatagccctcagcct

SEQ ID NO: 3 - DNA, 18 bp, Artificial Sequence
  Description of Artificial Sequence: Synthetic oligonucleotide
ggccttgggatagccctc

SEQ ID NO: 4 - DNA, 18 bp, Artificial Sequence
  Description of Artificial Sequence: Synthetic oligonucleotide
acttcggccttagggtag

SEQ ID NO: 5 - DNA, 18 bp, Artificial Sequence
  Description of Artificial Sequence: Synthetic oligonucleotide
agatgacttcggccttgg

SEQ ID NO: 6 - DNA, 18 bp, Artificial Sequence
  Description of Artificial Sequence: Synthetic oligonucleotide
tgtccagatgacttcggc

SEQ ID NO: 7 - DNA, 18 bp, Artificial Sequence
  Description of Artificial Sequence: Synthetic oligonucleotide
ctgcttgtccagatgact

SEQ ID NO: 8 - DNA, 18 bp, Artificial Sequence
  Description of Artificial Sequence: Synthetic oligonucleotide
ggtcactgcttgtccaga

SEQ ID NO: 9 - DNA, 18 bp, Artificial Sequence
  Description of Artificial Sequence: Synthetic oligonucleotide
ttgatggtcactgcttgt

SEQ ID NO: 10 - DNA, 18 bp, Artificial Sequence
  Description of Artificial Sequence: Synthetic oligonucleotide
aggacttgatggtcactg

SEQ ID NO: 11 - DNA, 18 bp, Artificial Sequence
  Description of Artificial Sequence: Synthetic oligonucleotide
cactcaggacttgatggt

SEQ ID NO: 12 - DNA, 18 bp, Artificial Sequence
  Description of Artificial Sequence: Synthetic oligonucleotide
cttaccactcaggacttg

SEQ ID NO: 13 - DNA, 18 bp, Artificial Sequence
  Description of Artificial Sequence: Synthetic oligonucleotide
gtggtcttaccactcagg

SEQ ID NO: 14 - DNA, 18 bp, Artificial Sequence
  Description of Artificial Sequence: Synthetic oligonucleotide
tggtggtcttaccactca

SEQ ID NO: 15 - DNA, 18 bp, Artificial Sequence
  Description of Artificial Sequence: Synthetic oligonucleotide
ggtggtggtcttaccact

SEQ ID NO: 16 - DNA, 18 bp, Artificial Sequence
  Description of Artificial Sequence: Synthetic oligonucleotide
gtggtggtggtcttacca

SEQ ID NO: 17 - DNA, 18 bp, Artificial Sequence
  Description of Artificial Sequence: Synthetic oligonucleotide
tggtggtggtggtcttac

SEQ ID NO: 18 - DNA, 18 bp, Artificial Sequence
  Description of Artificial Sequence: Synthetic oligonucleotide
attggtggtggtggtctt

SEQ ID NO: 19 - DNA, 18 bp, Artificial Sequence
  Description of Artificial Sequence: Synthetic oligonucleotide
ttggaattggtggtggtg

SEQ ID NO: 20 - DNA, 18 bp, Artificial Sequence
  Description of Artificial Sequence: Synthetic oligonucleotide
ctctcttggaattggtgg

SEQ ID NO: 21 - DNA, 18 bp, Artificial Sequence
  Description of Artificial Sequence: Synthetic oligonucleotide
ctcctctctcttggaatt

SEQ ID NO: 22 - DNA, 18 bp, Artificial Sequence
  Description of Artificial Sequence: Synthetic oligonucleotide
agcttctcctctctcttg

SEQ ID NO: 23 - DNA, 18 bp, Artificial Sequence
  Description of Artificial Sequence: Synthetic oligonucleotide
tgaaaagcttctcctctc

SEQ ID NO: 24 - DNA, 18 bp, Artificial Sequence
  Description of Artificial Sequence: Synthetic oligonucleotide
cacattgaaaagcttctc

SEQ ID NO: 25 - DNA, 18 bp, Artificial Sequence
  Description of Artificial Sequence: Synthetic oligonucleotide
ctggtcacattgaaaagc

SEQ ID NO: 26 - DNA, 18 bp, Artificial Sequence
  Description of Artificial Sequence: Synthetic oligonucleotide
gtgtgctggtcacattga

SEQ ID NO: 27 - DNA, 18 bp, Artificial Sequence
  Description of Artificial Sequence: Synthetic oligonucleotide
tctcagtgtgctggtcac

SEQ ID NO: 28 - DNA, 18 bp, Artificial Sequence
  Description of Artificial Sequence: Synthetic oligonucleotide
ttgattctcagtgtgctg

SEQ ID NO: 29 - DNA, 18 bp, Artificial Sequence
  Description of Artificial Sequence: Synthetic oligonucleotide
ttgtgttgattctcagtg

SEQ ID NO: 30 - DNA, 18 bp, Artificial Sequence
  Description of Artificial Sequence: Synthetic oligonucleotide
agttgttgtgttgattct

SEQ ID NO: 31 - DNA, 18 bp, Artificial Sequence
  Description of Artificial Sequence: Synthetic oligonucleotide
tcattagttgttgtgttg

SEQ ID NO: 32 - DNA, 18 bp, Artificial Sequence
  Description of Artificial Sequence: Synthetic oligonucleotide
aaatctcattagttgttg

SEQ ID NO: 33 - DNA, 18 bp, Artificial Sequence
  Description of Artificial Sequence: Synthetic oligonucleotide
gtagaaaatctcattagt

SEQ ID NO: 34 - DNA, 18 bp, Artificial Sequence
  Description of Artificial Sequence: Synthetic oligonucleotide
gtgcagtagaaaatctca

SEQ ID NO: 35 - DNA, 18 bp, Artificial Sequence
  Description of Artificial Sequence: Synthetic oligonucleotide
taaaagtgcagtagaaaa

SEQ ID NO: 36 - DNA, 18 bp, Artificial Sequence
  Description of Artificial Sequence: Synthetic oligonucleotide
tcctaaaagtgcagtaga

SEQ ID NO: 37 - DNA, 18 bp, Artificial Sequence
  Description of Artificial Sequence: Synthetic oligonucleotide
tctcctaaaagtgcagta

SEQ ID NO: 38 - DNA, 18 bp, Artificial Sequence
  Description of Artificial Sequence: Synthetic oligonucleotide
aatctcctaaaagtgcag

SEQ ID NO: 39 - DNA, 18 bp, Artificial Sequence
  Description of Artificial Sequence: Synthetic oligonucleotide
tctaatctcctaaaagtg

SEQ ID NO: 40 - DNA, 18 bp, Artificial Sequence
  Description of Artificial Sequence: Synthetic oligonucleotide
caggatctaatctcctaa

SEQ ID NO: 41 - DNA, 18 bp, Artificial Sequence
  Description of Artificial Sequence: Synthetic oligonucleotide
ttcctcaggatctaatct

SEQ ID NO: 42 - DNA, 18 bp, Artificial Sequence
  Description of Artificial Sequence: Synthetic oligonucleotide
tggttttcctcaggatct

SEQ ID NO: 43 - DNA, 18 bp, Artificial Sequence
  Description of Artificial Sequence: Synthetic oligonucleotide
ctgtatggttttcctcag

SEQ ID NO: 44 - DNA, 18 bp, Artificial Sequence
  Description of Artificial Sequence: Synthetic oligonucleotide
agtagaaaatctcattag

SEQ ID NO: 45 - DNA, 18 bp, Artificial Sequence
  Description of Artificial Sequence: Synthetic oligonucleotide
cagtagaaaatctcatta

SEQ ID NO: 46 - DNA, 18 bp, Artificial Sequence
  Description of Artificial Sequence: Synthetic oligonucleotide
gcagtagaaaatctcatt

SEQ ID NO: 47 - DNA, 18 bp, Artificial Sequence
  Description of Artificial Sequence: Synthetic oligonucleotide
tgcagtagaaaatctcat

SEQ ID NO: 48 - DNA, 18 bp, Artificial Sequence
  Description of Artificial Sequence: Synthetic oligonucleotide
agtgcagtagaaaatctc

SEQ ID NO: 49 - DNA, 18 bp, Artificial Sequence
  Description of Artificial Sequence: Synthetic oligonucleotide
aagtgcagtagaaaatct

SEQ ID NO: 50 - DNA, 18 bp, Artificial Sequence
  Description of Artificial Sequence: Synthetic oligonucleotide
aaagtgcagtagaaaatc

SEQ ID NO: 51 - DNA, 18 bp, Artificial Sequence
  Description of Artificial Sequence: Synthetic oligonucleotide
aaaagtgcagtagaaaat

SEQ ID NO: 52 - DNA, 18 bp, Artificial Sequence
  Description of Artificial Sequence: Synthetic oligonucleotide
tcaggatctaatctccta

SEQ ID NO: 53 - DNA, 18 bp, Artificial Sequence
  Description of Artificial Sequence: Synthetic oligonucleotide
ctcaggatctaatctcct

SEQ ID NO: 54 - DNA, 18 bp, Artificial Sequence
  Description of Artificial Sequence: Synthetic oligonucleotide
cctcaggatctaatctcc

SEQ ID NO: 55 - DNA, 18 bp, Artificial Sequence
  Description of Artificial Sequence: Synthetic oligonucleotide
tcctcaggatctaatctc

SEQ ID NO: 56 - DNA, 18 bp, Artificial Sequence
  Description of Artificial Sequence: Synthetic oligonucleotide
tttcctcaggatctaatc

SEQ ID NO: 57 - DNA, 18 bp, Artificial Sequence
  Description of Artificial Sequence: Synthetic oligonucleotide
ttttcctcaggatctaat

SEQ ID NO: 58 - DNA, 18 bp, Artificial Sequence
  Description of Artificial Sequence: Synthetic oligonucleotide
gttttcctcaggatctaa

SEQ ID NO: 59 - DNA, 18 bp, Artificial Sequence
  Description of Artificial Sequence: Synthetic oligonucleotide
ggttttcctcaggatcta

SEQ ID NO: 60 - DNA, 18 bp, Artificial Sequence
  Description of Artificial Sequence: Synthetic oligonucleotide
atggttttcctcaggatc

SEQ ID NO: 61 - DNA, 18 bp, Artificial Sequence
  Description of Artificial Sequence: Synthetic oligonucleotide
tatggttttcctcaggat

SEQ ID NO: 62 - DNA, 18 bp, Artificial Sequence
  Description of Artificial Sequence: Synthetic oligonucleotide
gtatggttttcctcagga

SEQ ID NO: 63 - DNA, 18 bp, Artificial Sequence
  Description of Artificial Sequence: Synthetic oligonucleotide
tgtatggttttcctcagg

SEQ ID NO: 64 - DNA, 18 bp, Artificial Sequence
  Description of Artificial Sequence: Synthetic oligonucleotide
gctgtatggttttcctca

SEQ ID NO: 65 - DNA, 18 bp, Artificial Sequence
  Description of Artificial Sequence: Synthetic oligonucleotide
agctgtatggttttcctc

SEQ ID NO: 66 - DNA, 18 bp, Artificial Sequence
  Description of Artificial Sequence: Synthetic oligonucleotide
cagctgtatggttttcct

SEQ ID NO: 67 - DNA, 18 bp, Artificial Sequence
  Description of Artificial Sequence: Synthetic oligonucleotide
tcagctgtatggttttcc

SEQ ID NO: 68 - DNA, 288 bp, Homo sapiens
ccccatacaacaaaatcaaccaaagaattttggttgtggatccagtcacctctgaacatgaactgacatgtcaggctgagggctaccccaaggccgaagtcatctggacaagcagtgaccatcaagtcctgagtggtaagaccaccaccaccaattccaagagagaggagaagcttttcaatgtgaccagcacactgagaatcaacacaacaactaatgagattttctactgcacttttaggagattagatcctgaggaaaaccatacagctgaattggtcatcccag

SEQ ID NO: 69 - DNA, 3691 bp, Homo sapiens
ggcgcaacgctgagcagctggcgcgtcccgcgcggccccagttctgcgcagcttcccgaggctccgcaccagccgcgcttctgtccgcctgcagggcattccagaaagatgaggatatttgctgtctttatattcatgacctactggcatttgctgaacgcatttactgtcacggttcccaaggacctatatgtggtagagtatggtagcaatatgacaattgaatgcaaattcccagtagaaaaacaattagacctggctgcactaattgtctattgggaaatggaggataagaacattattcaatttgtgcatggagaggaagacctgaaggttcagcatagtagctacagacagagggcccggctgttgaaggaccagctctccctgggaaatgctgcacttcagatcacagatgtgaaattgcaggatgcaggggtgtaccgctgcatgatcagctatggtggtgccgactacaagcgaattactgtgaaagtcaatgccccatacaacaaaatcaaccaaagaattttggttgtggatccagtcacctctgaacatgaactgacatgtcaggctgagggctaccccaaggccgaagtcatctggacaagcagtgaccatcaagtcctgagtggtaagaccaccaccaccaattccaagagagaggagaagcttttcaatgtgaccagcacactgagaatcaacacaacaactaatgagattttctactgcacttttaggagattagatcctgaggaaaaccatacagctgaattggtcatcccagaactacctctggcacatcctccaaatgaaaggactcacttggtaattctgggagccatcttattatgccttggtgtagcactgacattcatcttccgtttaagaaaagggagaatgatggatgtgaaaaaatgtggcatccaagatacaaactcaaagaagcaaagtgatacacatttggaggagacgtaatccagcattggaacttctgatcttcaagcagggattctcaacctgtggtttaggggttcatcggggctgagcgtgacaagaggaaggaatgggcccgtgggatgcaggcaatgtgggacttaaaaggcccaagcactgaaaatggaacctggcgaaagcagaggaggagaatgaagaaagatggagtcaaacagggagcctggagggagaccttgatactttcaaatgcctgaggggctcatcgacgcctgtgacagggagaaaggatacttctgaacaaggagcctccaagcaaatcatccattgctcatcctaggaagacgggttgagaatccctaatttgagggtcagttcctgcagaagtgccctttgcctccactcaatgcctcaatttgttttctgcatgactgagagtctcagtgttggaacgggacagtatttatgtatgagtttttcctatttattttgagtctgtgaggtcttcttgtcatgtgagtgtggttgtgaatgatttcttttgaagatatattgtagtagatgttacaattttgtcgccaaactaaacttgctgcttaatgatttgctcacatctagtaaaacatggagtatttgtaaggtgcttggtctcctctataactacaagtatacattggaagcataaagatcaaaccgttggttgcataggatgtcacctttatttaacccattaatactctggttgacctaatcttattctcagacctcaagtgtctgtgcagtatctgttccatttaaatatcagctttacaattatgtggtagcctacacacataatctcatttcatcgctgtaaccaccctgttgtgataaccactattattttacccatcgtacagctgaggaagcaaacagattaagtaacttgcccaaaccagtaaatagcagacctcagactgccacccactgtccttttataatacaatttacagctatattttactttaagcaattcttttattcaaaaaccatttattaagtgcccttgcaatatcaatcgctgtgccaggcattgaatctacagatgtgagcaagacaaagtacctgtcctcaaggagctcatagtataatgaggagattaacaagaaaatgtattattacaatttagtccagtgtcatagcataaggatgatgcgaggggaaaacccgagcagtgttgccaagaggaggaaataggccaatgtggtctgggacggttggatatacttaaacatcttaataatcagagtaattttcatttacaaagagaggtcggtacttaaaataaccctgaaaaataacactggaattccttttctagcattatatttattcctgatttgcctttgccatataatctaatgcttgtttatatagtgtctggtattgtttaacagttctgtcttttctatttaaatgccactaaattttaaattcatacctttccatgattcaaaattcaaaagatcccatgggagatggttggaaaatctccacttcatcctccaagccattcaagtttcctttccagaagcaactgctactgcctttcattcatatgttcttctaaagatagtctacatttggaaatgtatgttaaaagcacgtatttttaaaatttttttcctaaatagtaacacattgtatgtctgctgtgtactttgctatttttatttattttagtgtttcttatatagcagatggaatgaatttgaagttcccagggctgaggatccatgccttctttgtttctaagttatctttcccatagcttttcattatctttcatatgatccagtatatgttaaatatgtcctacatatacatttagacaaccaccatttgttaagtatttgctctaggacagagtttggatttgtttatgtttgctcaaaaggagacccatgggctctccagggtgcactgagtcaatctagtcctaaaaagcaatcttattattaactctgtatgacagaatcatgtctggaacttttgttttctgctttctgtcaagtataaacttcactttgatgctgtacttgcaaaatcacattttctttctggaaattccggcagtgtaccttgactgctagctaccctgtgccagaaaagcctcattcgttgtgcttgaacccttgaatgccaccagctgtcatcactacacagccctcctaagaggcttcctggaggtttcgagattcagatgccctgggagatcccagagtttcctttccctcttggccatattctggtgtcaatgacaaggagtaccttggctttgccacatgtcaaggctgaagaaacagtgtctccaacagagctccttgtgttatctgtttgtacatgtgcatttgtacagtaattggtgtgacagtgttctttgtgtgaattacaggcaagaattgtggctgagcaaggcacatagtctactcagtctattcctaagtcctaactcctccttgtggtgttggatttgtaaggcactttatcccttttgtctcatgtttcatcgtaaatggcataggcagagatgatacctaattctgcatttgattgtcactttttgtacctgcattaatttaataaaatattcttatttattttgttacttggtacaccagcatgtccattttcttgtttattttgtgtttaataaaatgttcagtttaacatcccagtggagaaagttaaaaaa

SEQ ID NO: 70 - protein, 290 aa, Homo sapiens
MRIFAVFIFMTYWHLLNAFTVTVPKDLYVVEYGSNMTIECKFPVEKQLDLAALIVYWEMEDKNIIQFVHGEEDLKVQHSSYRQRARLLKDQLSLGNAALQITDVKLQDAGVYRCMISYGGADYKRITVKVNAPYNKINQRILVVDPVTSEHELTCQAEGYPKAEVIWTSSDHQVLSGKTTTTNSKREEKLFNVTSTLRINTTTNEIFYCTFRRLDPEENHTAELVIPELPLAHPPNERTHLVILGAILLCLGVALTFIFRLRKGRMMDVKKCGIQDTNSKKQSDTHLEET

SEQ ID NO: 71 - DNA, 20023 bp, Homo sapiens
gcgtcccgcgcggccccagttctgcgcagcttcccgaggctccgcaccagccgcgcttctgtccgcctgcaggtagggagcgttgttcctccgcgggtgcccacggcccagtatctctggctagctcgctgggcactttaggacggagggtctctacaccctttctttgggatggagagaggagaagggaaagggaacgcgatggtctagggggcagtagagccaattacctgttggggttaataagaacaggcaatgcatctggccttcctccaggcgcgattcagttttgctctaaaaataatttatacctctaaaaataaataagataggtagtataggataggtagtcattcttatgcgactgtgtgttcagaatatagctctgatgctaggctggaggtctggacacgggtccaagtccaccgccagctgcttgctagtaacatgacttgtgtaagttatcccagctgcagcatctaagtaagtctcttcctgcgctaagcaggtccaggatccctgaacggaatttatttgctctgtccattctgagaacccaaaggagtcctaaaagaggaatggaggagcctaagaataaaaatagtataataaaacatttcttagacacattgaccttggcctatgtcaaagttcagtctgggtttgtcttataacacaaggagtaaaagtaccattgttctacctctttttttaatacttgaaaaaaatttactgtggatgcttttctatgaattaaataaccttctaaaaaatgttttcattgctgcattcgattagattgggtaactaaatgaaattaattcctcactgttgggtataaaggttatttacagtggttctgtcttagccattcactgaactcattgcatatatatctctggaatattgctgattgtttccttcaagtaaacttagaagtgtaactacttagtcaaagagcctgaatattttaaaggccttttgaagaaaactgaaaatgctttccagaaaggatgtatcagttgacaatgacagtcgtcaacagtatttaaggagaactatgatactctgaagaaaaacttagcctttctcagtaaaagtaggtaggcagaggccacatgacagcagttagagtgtggtcttcaaggaagtcacagaaatactgtggggaattgaaaccccatgtggaaaatgtacaagagtgtctcagtgtgactgagaaggaggttgggcatggggtttcatggagtttaataaagtttggtcacttagtagaggtttaataaatcaactgtcttaatctttgatcctacttaagaattttttttttgtttttgtagagatggggctcttgttatgttgcccaggctgttctcgaactcctagcctcaggcgatcctccctcctcaggctccagaagtcctgggattactggcgggagccaccatgcaggcctcttgctcctacttttgagaaaggaagtttaaccggttttttttgtctttttttttttttttttgagacagagtctcactctgttgcccatgctggagtgcagtggtgcaatctcagctcactgcctcccgggttcaagtgattctcctgcctcagcctcccgagtagctgggactacaggcacctgccaccacgcccagctaatttttgtatttttagtagaaatggggtttcaccatattggccaggctgatctcgaactcctgacctcaggtgatccgcctgcctcggcctcccaaagtgctgggattacaggcatgagccactgctcctggctgcttaactttttctctatctcatcctcctacccatcctacccttggaagatagagaagtagtattagttccatagtgttatactgggcttcccccagggacaaacccacttccccaacctgaatgagccatcacttcttccccagtttacatttcattgctctttaaatgtctccattcggatatgggaattcacatatggtcataattcttacctgaagaagatgtcagtcttcttctcttagaccaactgccctgatatgaggtttagaggttaaagaacatgtgtgtatttacatgatctttgtattctgccttttcgtccctcactaatgacagctgcaccccaaggaaatggagctgtggaagagagggtttgataagaaattaagtaaatattggatctaatccatcaccctccaggaagcctttattactcctaaaaatttcaaccaaattcattaaaggacaagaactccaccagagtaggccataaacattggcaaaattagttgtaatccatgactagatttaatgtccctttgttttattcccatatggttataatgctttgcttggcattaggggtattttaagttttcttctgcctagtaagtgaatttgtgtttataatacaataatcataaaatatcacattaatattttataactgtacagttataaaatattttataagtaatatttatattttataagtaatattttataactgtacagttaactctggcccaaggaaaagatagtctgatagatgctgcagccccattttagcaaatgtgacctcacaggcctgaatgccatcgctattccacatctacaggatagacggaaaggaaagaaataaaaaaataggtacctaacactggcaagaggatgatgactcatgttatttcacttaacctttttatcttttaacatgaaggactcatacaggttgataagaaaccagtgacataaacagaccaaaaaatgatcagatctttcaaattagcaaaaaaataatattttttaaacaatgggtgaaaatacagtgtaacagtaccaattatcaacatgtgttgagaaccagaaaaatgttctttttctttgatcagcaacactatttgggaaaatctatcctcagggcctagcctggggccctggcacacagtaggcactcaacgaatatttgctgaacacacaaatacttatgatattttaaaaaattggcaacaatctgatacctaacaatagagggattaaatattatggaactgttaaataagatgcttatgaataccatgcagtaagatgggcaatatttatgccataagctttaatgaaacaaatgggtattaaatgtatgataaggttataaattactttttaaaagattacagggaaaaaaattgaaagatatacactgaaatgttttttgctcacagtggtgacaaggtttctcagcactggcactgttgacgttttaggctgtatgtctttgctgtgggaggctggcctgtgcactgcagggtgtttggcagcactcttggcctctgcccctagatagcaatagcagtcctccctcaaccagcccaattttgacaaccaaaaatgtttccaggcatcaccagatgctccctgggtgagagtgatgaaatagtaggggattttccccttcttttcttattttctgtaattccattatattactttaataataaagaaaaaaacataaaaaataaacgaatgttattattctacgtcagtttggatgtttggactccattttggggttctttccattatatcacttggtctgctaaacattctacggtttggtaaggtgaagtgattcatgaaattttggttttatttttttcctgatactaaaaataaaacattctttcacttggaaatttggacacagaacaccaaaaaaaatccataatctcatctctctttttctgtcttttccttccttttttccctttaaaaacaataaagagtgaaacctacctgttctccctctaatttaattcctaaatataatcactgtcaatatcttggacatttcctgtgtctaaacacacacacacacttttttttttcagcaaaagtggatttctgctacatgtagtgttctgcaacttactttctatgtgtttacaaaatcagtacatgtacatatgctgaattcagtccttaatggtattatattttgtgaatataccaaaatttgtttaaccacttagacaatctaggatattctcagtttgctgttatgagcaatgctcttcctttacatatacagacatatatatatatatgtgtgtgtgtgtgtttttgttttagtaggatagatttctaggagagggtgaaaggtcttatgacatccgcatttacgattgtaataggaagtatcaaagtgccccctaaagaaaaaaatcctcccattagtgggtaagaaagcctatttgttcatatcttcacaaacactaaatattagaaatatttacaattgtggtcaagctcataagtgaaaatggtatttcatatcttatattttttattgtgagattgaacatctttcatatgtttacatgtcacctgtatttcttattctctgaactatatgttatgacctttcactttttttcctcatgggttatgtgtagtttgtatagttgtcttattgattgttaggagctatttatatattaggaacattaatctcctgtcttatatatacgtggcatcgattagttgatcatttgtgagttcatgtctgtatacaaagattggagaggcactaagagggaaaacttacctctttcttatcaaagtttgtaaatatatgtataacagaagagggagaaaatattaataaatgcacagattggctgaaatagagtataaatcttttactcccctacttcaacataaactgcaaaaggagagtgacttttctttcactctgacttccgtattcctcatgcttaaaatagtgcctagcacagaagaggtgctcaatcagtgtttgctaaacgaaataattagtcacatttcaagcaggatgactaaatgaagaatagaatctaggcagatactctggaagagtggctgtgagtcattcatatcttagtatgaattagtcaaatccaactctctccccttcccactccccactgttagtagaagaatctgtttattgagagaatagatttataatttagaataagtgagaggggcagaagaggagattttgaaggatggcacctgaaggaggactagcatggctgagacagtgaagtggaagccttgaatagctaaagggtaagatgaaagtatttagctgtagggggaaaaagcattgacaggttggaaaagtaaaagtcagattctccttgctctgaaattttgtacagggcaggttctactaggtatgttacaatgcagaaaaaacatgaaataattgagaggaatttggtgcaatattatcttcttggcttcttttgagtgggcagatttttttcacggcctgtaactataataaatttgaaacttctcatcttttagtaacttttttcacttaagtttatgtggctgtgggcaatggaatgaagatattgaacttccaattccctgttgggtttccacaattacaagtcaatcatgactggttattagaagactatttcagttagaaccaccaagtcccatattgtcatattgtatgtttaattattaagtgaagcagtcttcttttcgtgttttccataattagggcattccagaaagatgaggatatttgctgtctttatattcatgacctactggcatttgctgaacggtaagacaccaaatccttccattaggttctatattttaaatattttaaccatgagtttaaaactaaaatgatcatttaaaatgcatgcaattttcttatagagagaacattctattctttcttctactttacacaatggcaaagtcttctttctactttacgcaatgataaagttacctgtgtcattttgtaaaaatatagagaatatagacaaattgaaagacacaaaataatctattacccatttcccagggttaactactgaaaatatctggggaaatggcctgtatgtatacatttatttgtttgctttcaacaaggccaagatcctttgatctttcagtcttggttgctctgtgacatgcctttcctgatgaggatactttaaggaagaattgtaagatacatggaaaatgtcaggctaacacagtactggcatcaccctgtgctctttcctgaactccataccaatgtacttcttgccagaaaactgatcaaaagtttagggaagtaaaaagagatgactgttagaatctaccattccctctatgtaggaagcaaataggtgtcctgtcaaaggacattctggggatgtctacatgaaaccaagtctccctggttgtaaggactccatctccatataatatttatacagtaatatatgtttataaattgtgggggcaacttgtttagctaattttattattctgctattgggacactgtgtctcagcatgagatatagtgtcccaaaacatatttcaagcccattggataaaatatgtgtttagcaagttcttaaatataatgataacataaccgaccagataaagtgatttataaacgctgtgccaattttgtaaatgtttcgaggaattttcccttttctgaagattgtccttctttctttttagcatttactgtcacggttcccaaggacctatatgtggtagagtatggtagcaatatgacaattgaatgcaaattcccagtagaaaaacaattagacctggctgcactaattgtctattgggaaatggaggataagaacattattcaatttgtgcatggagaggaagacctgaaggttcagcatagtagctacagacagagggcccggctgttgaaggaccagctctccctgggaaatgctgcacttcagatcacagatgtgaaattgcaggatgcaggggtgtaccgctgcatgatcagctatggtggtgccgactacaagcgaattactgtgaaagtcaatggtaagaattattatagatgagaggcctgatctttattgaaaacatattccaagtgttgaagacttttcattcttgtaagtccatacttattttcaaacagaacagcatagtctgttcattcattcattcaattcatgaattcattcacataattatccaatttcttgagcacctatttgatagtcactggaaatccagagacaaacaacacagagccatgttctacagtatgtacagttttccaaaaagaatttctagtctttacttttttattacaaatggaatacgtatacttgcaaataattcagatactgtggaagagatcaaatgaattgcaaaagtgtccctcctcccttcaccactatctcccatggcatgcagagagagtaaccattatttgtgtgtccctccagaaatttttttattcaactactatttttttattttattaggtccgtcagttttccttttttgagcctctctatatcaaatgcaaataaatatattcagaacaaaccccactgtaaggttcacattaaaaaagacttgaagtcaccctatgaagacaaaaaataatcacattaagtgtgaaagaacctattcttccagtacaggataagccatacttactgggcatatattcatcttgaaaatctatactgatgttgtcttggggaattgaaaaggaactaggagtgttagttcctcggtattgacccacagttatgttatcaggtcacttgagttcaaagttttgtgttggcactagctaagtaaaggaaaacacctctgctttcattgttgagtttcacagaattgagagctgaaaggatcccaggcaggagcagctaatccaaactcccacaaagaacaaaaatcccccagaggatcttctgttcttatatttcctgcaatggcgtccctgtcatatcccacaatggcctccctgccatttggatatcccttccatatcctgttgaaattactccctaatagtaagctgaaatctgcccctctagttgtagtcttgggattatttcatttacatgatgaccttttaatatttgactagaattaaatcatctccccttggtctttccattcctgggctaactaccatcaatctgagggctaacaatacaagtagaaaaagtatacatttgtcactgatcactgatcaattattaatcaatgatcactgataactataaactcaaaaacaaaatcatgtggggattaagagaaatgtatcagttttatgttgtatttctggtccctgatactggctcaggtaatgccactattgtcaagaagataccacttgtaaagtagatttaattttcattatattttaccatatgcttctccattcatgacatctcttgagatgttgtggtttatactttcagtttttctccagtccatccgcaaatatcaggcatctactgtgttccaagatattaaagaaatcatcatgacttagcctcatcaacagcattgctagatctgggatggaaaggaagagtataatcctggcagtcaggaagaaggcagcataaagtataagtttctgcttccaaaaaaggtctctcatcagcctgtagggagtgtgtagggaagggacagctgtccttgtagtagggaagggttttattcaggtcgtctgggctccataatatcccttgtgtatctgcagtctcctttgccatggatcaacacaataggaaatcttccggcactgatggtttttccaagggggagttcttcctggagcaaagcaaatgaccaaccaggtttgaggacctgatttgtttgacaattccattttgtattgtaaattacttaattggcattctactcccaatccatcttgtcatttgcatacagtggttttgggattgagttcagctataccaaaagtctgaaccttctgcacttagaacaaggcaaccaccaagcttcacttgcactgaggccgtgtctccaatggaaatgaggcagctggcttgcaggagcttcccaactcagggaagtagaactcctgagtcacctccatatgcaaatgatttcacagtaatgctgttgaacttcacttcccatcacagcaaatgtgtggtaacatagcttccccacaggagtttactcaccatggtattttaaaggtgaaacatttcaaaactgaaatttgaaagaatttagttttggattcactcaattatcactatcacttcgggtgttattgcacctttcttgtttgtgagtttaaatgccagactctcaggccactaactttcaattaaaagtgtttttctttaatcgctgaacctaacagcagggaaaacgaaatgttcattcagactttcagaaccttcaatgagattaggcagctgaaagatcaaagtgttgcatagttgtcccgataaagctatttggatcatatggaccaaatcgactgctgtcattccccaccaaccccatctctccccaaaattcccagccctgtttaagtgttctctgtagcatttatctctatctagtatattgtgtagcatatcatatcatacttttctgttttgtttattgtctctctcctcctagaatataaactccacaagcacaaagatttgggcctgttttataatattgttgcatccccagggcctgatatacagcagagtggtggtacgaaaagagcacacaaaaaaatatttgttgagtcaatgaatgaatgatttcctcaaataggattagcctaaaattttggaaacatgaacagatttggatatgtgaaaatttatttccagactgttcatcaggaactgttagcagcttctaaagggtacactggagcagcagtagtaaaaggaggaagaggagcagctctgctactgctactatcgagtactactacaattagcacttgcttattctgtgtgttaggccctgtactgaacactctgtctaaattagttcatttcctcctggaaatgactctagggggtaagtgcttcatcatgtaagatgagtatttttcacattttgttgtgtctgaaatctgagtgtgtctttcaatgatggaatctttgattccatgataagtggtattattcccattttaaggatgaggaaactgaggtccaaagaaattaagtaatttgcccaaattcacccagcctagaaaatgataaagctagttctaaacccaagcagattagctctgaagtctgggcccttaataaccactttttattgcctatatttgtacctctggtgtacgtatcaagttatatgttgacttcaaaactatcatgaccttttcttggttttgattgtccaacattagtatagtgttctgggtctgcaaaaattttgattactcatctcatctgtaaaacattttgaactcgtgtgtttgtgcatgcacatttgtgtgtaattataaaaattttactttctgttaatatataagttgtatcataagaaactgccgtttttgaagagcaaaaaaaggttgaatgttaccagttacatctggttcaacctaatagacatttgtacaaaaacagacattttaagaggttgaaataaaaatttaataaacaatattttcagtttttactaattgtgatgcttcactatcattagctaatatgtcaaggcataatataccttagggtgaactttatcattaacaaaggtggatggtgtcaataatcttgaggtttgtgtttttttatataacactgcgaggtctaattaagtacttactgtttaccacctcatacagtggccgataaaaagtgtcacttctgctgtttcctctgggttgtgcttgaattattagtattatcttcagtcctcagtttctttgtgggaaactttttaattagttgtttaattttgtaagatggttagtttagtcaaaattagataagagaatttgaaaatccgtagctaccccaaagcaacctacacataagaactattatttttgtgttttgaaatcataattttattgatttccagtgtttccactggtagtggtttcattgatataggagtatcaaaacatcactcattatttatttcagtttcatttgatcctagccgttttgtattaactctctgtgaagaaattacctcacaaatctattgctgtccttggtaaaggaatggagaattaaggctctagatcattagtggttacactatagtattagaagtaaaaaaaagattataccaacaaaataagaacatgttaatgtacttgtaatgaataaacatgaataaagctcttatgctatataggtgcactaaacaatctactagaattgtcagcaaactacgtatcttaatcctgaaagggtcccaaaccaatgatctaaaattgaatcaaactttcttccttgagcataattacttaaatgatttattaaaatagccagcatttaaaagcttaaaatgtaaatatcataatgtggtatcctagatagcatcccagaacagaaaaaggatattagggaaaaactggaggaatggaataaattatgcagtttagttattaataatgtactaacgtccttagttatgacgattgtaccatggtaatgtaagatactaacaatagaggaaaccgggtaaggagtatacagtaactctatactatctttgcaacttttttgtaaatttaaaacttctaaaataaagaacaaatttaaacattaaaaagtatcaccaggaacatatatcactgtttacagatgaaatactatgtattttcatatctaatttctgatcattgacttcaaatcagaaaagtgaatgacacctcaaaatcaggttttctgtttactgaagtctaagaaaagaaagcataccagctggagagattcatgtttataaagacagatttataacaacaaaaataaaatatccaagaataaatttaagaagaagcactttactgagaaacatatgaaaacctgaacaaatggagagggatattttgtatttgaatagaaagacttctggtttaaagataattctctttaaattattttttgtagaaatttaaggggtacaagagcagtgttgtcacatggatatattacatagtggtgaagtctggggttttagtgtaaattaatctttacattttgtttgagcccaataaatgtaccaacatgatttttatagaaagatagtcattcctattaatccaaacttgtcccaactttgaattgaattgaggcagagctagcaggtgttccccacggctgaggcatctgaacattaagcatatccctctgagaaccagcctgcattgatactctttctaatgtggacagcatcaagctatgtacgtagttctgtgctcagcaaaagccctgacttctttttgtttatgtcctagccccatacaacaaaatcaaccaaagaattttggttgtggatccagtcacctctgaacatgaactgacatgtcaggctgagggctaccccaaggccgaagtcatctggacaagcagtgaccatcaagtcctgagtggtaagaccaccaccaccaattccaagagagaggagaagcttttcaatgtgaccagcacactgagaatcaacacaacaactaatgagattttctactgcacttttaggagattagatcctgaggaaaaccatacagctgaattggtcatcccaggtaatattctgaatgtgtccattaaaatatgtctaacactgtcccctagcacctagcatgatgtctgcctatcatagtcattcagtgattgttgaataaatgaatgaatgaataacactatgtttacaaaatatatcctaattcctcacctccattcatccaaaccatattgttacttaataaacattcagcagatatttatggaatataccttttgttccatgcattgtagtactcattggatacacatagaataataagactcagttcacactcttcaggaaacagataaaaaactaagaaacaaacaaaaaacaggcaatccaacaccatgtgggaaatgctttcatagccgggaaacctggggaatacctgagaggaatactcaattcaggccttgtttcaggaatccaaatcctggcacatcagagctgcttccctctttccagggtggcaggaaataaatggaacatatttttctatcttatgccaaacatgagggaccctttctccccggtgcctctcccaaggtagtctacaatatttcaactctagcagtctgcttagtgcatagaacatgaggctgtgtgtccctgggcaaattactagacttctgtgtgcttcactttccctgtaggattataatctactgagcaagcttattgtaagggtcagattagcaacagtgtatgaaaatgatttgagaccattgcctgcacaaattcaactatttttttttatctcactactctacagaagtaggtagggtgggagacagagtctgatgagaggctcagaatgtgaaagaaagtgaggcgagtgagcatgatatttaatataaacacaaagatattctgagaagagctgctcactgccccctcccccaatacatgttgataggaaaatgccacgtacttcagcaaaaacaactgaaaaattagatagaaaagtcaatcaataggaaaagataatccaggacggtgttgtgaacagaaagagggggaaaaaactttagaaaatgatggggatgctcttactggggtacgagtcctcaggtattgaactggctttcagtaaaagctagattagtgggttcctgccatttacaagctgttttatgacaacttacttgttgggtggcctacagtaactcacctaactgcactgagtctgtttcctcatctgtaaattggggatttttttttaaatacctggcatgcctaactcataaagttgttctgaaactgaaataaaacatacgtgaacaggcattgtaaactgtaagttacggaaaaagctggctgttgttgtgtctttaaagtttcacctgggtagtcaaagatggatcatgggtctcagtggagagctgagccaggcaggagctgactaagggtgagaggtgggagttagcagcctctgaacatctgtgtaccatgggaccccctttcctcctgcatggtaccccagacaaggagcctagtaagagatactaatggcttgttgtccagagatgttcaaactgcagagaaagataagacaacaagcattggcctccaatcatgatgacagataggaggaggtgggagctccttagcagtgctggttggccttccatgttctactgtgggccatctctgccatgtactgtaggctactagcttctatattaaagaatgcaagaggggccaggagcggaggctcatgcctgtaatctcagcactttgggaggccaaggtgggcagatcacttgaggtcaggagtttgtgaccagcctggccaacatggtgaaactctgcctttactaaaaatataaaaattagctgggtgtggtggtgtgcacctgtaatcccagctactcgggagactgaggcacaagaattgcttgaacctgggaggcggaagttgcagtgagcccagattgcgccactgcactccaccctgggcaacagagaaagactctgcctcaaaaaaaaaaaaaaaaagcaagaggaagtgaaataatcaaggccgccatttaatagtgagcagccactccatgtggtactgtgcaagcacattataaatattagcctcacaagaaatgtattagcatttgtattttgtacactggttaagtatcttgcccaagacctcaaaactggttaagggcagcagaatttagccccagcaccaccttttcaaagcctgggcttctcacacttctccatgctgttcccattttaacacaggtatctcgccattccagccactcaaactttggcatttaagaaaattatcctaaagctaaactaaacttcaaggatgaccattctcctgaccccttcccatcaaaattttatctttagtcagtttgttttcgttttgttttgtttttcagaactacctctggcacatcctccaaatgaaaggactcacttggtaattctgggagccatcttattatgccttggtgtagcactgacattcatcttccgtttaagaaaaggtagtatttccttaattgcagtggtctccactgggggtgaggaaggggtgagaattggatcatggctgcaaggaaacccgacttaacctctgcaaggtggtgcaaaggcattccactgttcaacagcaattatattgaagctgagtgggatcactgggtgaagatgaagcgtaaggggtgaggggcaggagaatgggtatggatggaggtagaagatgcagtgtcatacagtttttttctatcatgaaaataaccacagacttacagaagagaaagagctaaaatgcccgtcattttcagttgcattttagtcttgcattagttgcaaccagctggtttctgggtaccctaagtaataaaaatagttcctctgtagaactgtagtatgtttaccatagagtattttgcaaaatttttggtagaggatgttacataatttgcatgtgttcatttctccatttacctgtgggaacaattaaaatccaggaaaatgagtatattcaaataatttcctcccatttaagatgagtcagagtaaataattcctccaatacttagagaagtataccaagagatccagtgatggtatagagttgtctgatgttaaatagggaagtagaatatggaaggggattccaatagtcgttgaaaaattccccataaccccttacatgggggaaagtagtgttaactgagagagtagagataagctgtttccaaaaattatattcttaacaggactgagatagccagaatataaggatcaagtttcaatgacagtaagatcctgagatggagttgatttgcacaaagaaataattgttgccagcatgcattttgaatatttctctggaaaaaaagattagttggcagtagaaatggatagaaatcaatagatattaaaatacctcagaatttggttcatctctgggaaaagatgaaaaataaaagtgtatactcctcaagaacatctaggatcaaaagcatgtgccctacactattgaattaattaacctcataagttgggacctgtggaataaggatgtccaccagacttcctagggattacaaatgtttcacagaacttgaaatttaaacttgggtcactgtatgggatgtagagctgtgctatatggaaataaaaatgatttctttttctcaagggagaatgatggatgtgaaaaaatgtggcatccaagatacaaactcaaagaagcaaagtggtaagaatatcagaaggaattgggaagtaaaagtcaaaggaaacaaaaagctaaagcaataacaaagagaaatccatcagtcataatctcctctccttttaaagaatgctggttcccctttgcctcacagctaacacaagaactcctccaccgtctgaggaggtttaggagcagggaaggggaaggagtcagcttcatttgctaatcttctgttgccctgcaccctagcagctccttgcagcaggggacaaggatgacttaggtggatggataattaattgattctaaaatattgtgtgtcagtattgtaatactatgttaattgcaccatgcacggtatctcatttaatcccccaccccttgccattaccaaagagagagagagagagagagagagaaatactagaatttatcctcattttacagtagagaaaacagagggtcaagaagataatgtaaagtgcccaagaacacacagctgatcacaaaaatcaagcttgggggccattagcctaaccacagacccttactcttaacccatctgcttcaatccattttgctacaaatgtttacatttataagcagggcagaaaaacctcatccaggttattgaactaagaagaaagttatattaaggtttctaatttttttaatgtagttagaaaccaaacttaacaatgagcccaagtttaaagcagtctaattaacctggacaagctcaggcaagtttcattctgtggcccatagcatcatctgtgttgtaaagctaagtagcaaatgttgtttgggtcatgctgggggacaagccatcccaatttgctcaggactgaggggttttccaggatatcatgtaaggataattgggtacaaatataacctgctgctttctctcatttcaaatttatcatttatcatatcagcaactatgagttatgttttttattagatttcttgttactttttccccagaccacttcccatgaaattaatatactattatcactctccagatacacatttggaggagacgtaatccagcattggaacttctgatcttcaagcagggattctcaacctgtggtttaggggttcatcggggctgagcgtgacaagaggaaggaatgggcccgtgggatgcaggcaatgtgggacttaaaaggcccaagcactgaaaatggaacctggcgaaagcagaggaggagaatgaagaaagatggagtcaaacagggagcctggagggagaccttgatactttcaaatgcctgaggggctcatcgacgcctgtgacagggagaaaggatacttctgaacaaggagcctccaagcaaatcatccattgctcatcctaggaagacgggttgagaatccctaatttgagggtcagttcctgcagaagtgccctttgcctccactcaatgcctcaatttgttttctgcatgactgagagtctcagtgttggaacgggacagtatttatgtatgagtttttcctatttattttgagtctgtgaggtcttcttgtcatgtgagtgtggttgtgaatgatttcttttgaagatatattgtagtagatgttacaattttgtcgccaaactaaacttgctgcttaatgatttgctcacatctagtaaaacatggagtatttgtaaggtgcttggtctcctctataactacaagtatacattggaagcataaagatcaaaccgttggttgcataggatgtcacctttatttaacccattaatactctggttgacctaatcttattctcagacctcaagtgtctgtgcagtatctgttccatttaaatatcagctttacaattatgtggtagcctacacacataatctcatttcatcgctgtaaccaccctgttgtgataaccactattattttacccatcgtacagctgaggaagcaaacagattaagtaacttgcccaaaccagtaaatagcagacctcagactgccacccactgtccttttataatacaatttacagctatattttactttaagcaattcttttattcaaaaaccatttattaagtgcccttgcaatatcaatcgctgtgccaggcattgaatctacagatgtgagcaagacaaagtacctgtcctcaaggagctcatagtataatgaggagattaacaagaaaatgtattattacaatttagtccagtgtcatagcataaggatgatgcgaggggaaaacccgagcagtgttgccaagaggaggaaataggccaatgtggtctgggacggttggatatacttaaacatcttaataatcagagtaattttcatttacaaagagaggtcggtacttaaaataaccctgaaaaataacactggaattccttttctagcattatatttattcctgatttgcctttgccatataatctaatgcttgtttatatagtgtctggtattgtttaacagttctgtcttttctatttaaatgccactaaattttaaattcatacctttccatgattcaaaattcaaaagatcccatgggagatggttggaaaatctccacttcatcctccaagccattcaagtttcctttccagaagcaactgctactgcctttcattcatatgttcttctaaagatagtctacatttggaaatgtatgttaaaagcacgtatttttaaaatttttttcctaaatagtaacacattgtatgtctgctgtgtactttgctatttttatttattttagtgtttcttatatagcagatggaatgaatttgaagttcccagggctgaggatccatgccttctttgtttctaagttatctttcccatagcttttcattatctttcatatgatccagtatatgttaaatatgtcctacatatacatttagacaaccaccatttgttaagtatttgctctaggacagagtttggatttgtttatgtttgctcaaaaggagacccatgggctctccagggtgcactgagtcaatctagtcctaaaaagcaatcttattattaactctgtatgacagaatcatgtctggaacttttgttttctgctttctgtcaagtataaacttcactttgatgctgtacttgcaaaatcacattttctttctggaaattccggcagtgtaccttgactgctagctaccctgtgccagaaaagcctcattcgttgtgcttgaacccttgaatgccaccagctgtcatcactacacagccctcctaagaggcttcctggaggtttcgagattcagatgccctgggagatcccagagtttcctttccctcttggccatattctggtgtcaatgacaaggagtaccttggctttgccacatgtcaaggctgaagaaacagtgtctccaacagagctccttgtgttatctgtttgtacatgtgcatttgtacagtaattggtgtgacagtgttctttgtgtgaattacaggcaagaattgtggctgagcaaggcacatagtctactcagtctattcctaagtcctaactcctccttgtggtgttggatttgtaaggcactttatcccttttgtctcatgtttcatcgtaaatggcataggcagagatgatacctaattctgcatttgattgtcactttttgtacctgcattaatttaataaaatattcttatttattttgttacttggtacaccagcatgtccattttcttgtttattttgtgtttaataaaatgttcagtttaa

SEQ ID NO: 72 - DNA, 20064 bp, Homo sapiens
ggcgcaacgctgagcagctggcgcgtcccgcgcggccccagttctgcgcagcttcccgaggctccgcaccagccgcgcttctgtccgcctgcaggtagggagcgttgttcctccgcgggtgcccacggcccagtatctctggctagctcgctgggcactttaggacggagggtctctacaccctttctttgggatggagagaggagaagggaaagggaacgcgatggtctagggggcagtagagccaattacctgttggggttaataagaacaggcaatgcatctggccttcctccaggcgcgattcagttttgctctaaaaataatttatacctctaaaaataaataagataggtagtataggataggtagtcattcttatgcgactgtgtgttcagaatatagctctgatgctaggctggaggtctggacacgggtccaagtccaccgccagctgcttgctagtaacatgacttgtgtaagttatcccagctgcagcatctaagtaagtctcttcctgcgctaagcaggtccaggatccctgaacggaatttatttgctctgtccattctgagaacccaaaggagtcctaaaagaggaatggaggagcctaagaataaaaatagtataataaaacatttcttagacacattgaccttggcctatgtcaaagttcagtctgggtttgtcttataacacaaggagtaaaagtaccattgttctacctctttttttaatacttgaaaaaaatttactgtggatgcttttctatgaattaaataaccttctaaaaaatgttttcattgctgcattcgattagattgggtaactaaatgaaattaattcctcactgttgggtataaaggttatttacagtggttctgtcttagccattcactgaactcattgcatatatatctctggaatattgctgattgtttccttcaagtaaacttagaagtgtaactacttagtcaaagagcctgaatattttaaaggccttttgaagaaaactgaaaatgctttccagaaaggatgtatcagttgacaatgacagtcgtcaacagtatttaaggagaactatgatactctgaagaaaaacttagcctttctcagtaaaagtaggtaggcagaggccacatgacagcagttagagtgtggtcttcaaggaagtcacagaaatactgtggggaattgaaaccccatgtggaaaatgtacaagagtgtctcagtgtgactgagaaggaggttgggcatggggtttcatggagtttaataaagtttggtcacttagtagaggtttaataaatcaactgtcttaatctttgatcctacttaagaattttttttttgtttttgtagagatggggctcttgttatgttgcccaggctgttctcgaactcctagcctcaggcgatcctccctcctcaggctccagaagtcctgggattactggcgggagccaccatgcaggcctcttgctcctacttttgagaaaggaagtttaaccggttttttttgtctttttttttttttttttgagacagagtctcactctgttgcccatgctggagtgcagtggtgcaatctcagctcactgcctcccgggttcaagtgattctcctgcctcagcctcccgagtagctgggactacaggcacctgccaccacgcccagctaatttttgtatttttagtagaaatggggtttcaccatattggccaggctgatctcgaactcctgacctcaggtgatccgcctgcctcggcctcccaaagtgctgggattacaggcatgagccactgctcctggctgcttaactttttctctatctcatcctcctacccatcctacccttggaagatagagaagtagtattagttccatagtgttatactgggcttcccccagggacaaacccacttccccaacctgaatgagccatcacttcttccccagtttacatttcattgctctttaaatgtctccattcggatatgggaattcacatatggtcataattcttacctgaagaagatgtcagtcttcttctcttagaccaactgccctgatatgaggtttagaggttaaagaacatgtgtgtatttacatgatctttgtattctgccttttcgtccctcactaatgacagctgcaccccaaggaaatggagctgtggaagagagggtttgataagaaattaagtaaatattggatctaatccatcaccctccaggaagcctttattactcctaaaaatttcaaccaaattcattaaaggacaagaactccaccagagtaggccataaacattggcaaaattagttgtaatccatgactagatttaatgtccctttgttttattcccatatggttataatgctttgcttggcattaggggtattttaagttttcttctgcctagtaagtgaatttgtgtttataatacaataatcataaaatatcacattaatattttataactgtacagttataaaatattttataagtaatatttatattttataagtaatattttataactgtacagttaactctggcccaaggaaaagatagtctgatagatgctgcagccccattttagcaaatgtgacctcacaggcctgaatgccatcgctattccacatctacaggatagacggaaaggaaagaaataaaaaaataggtacctaacactggcaagaggatgatgactcatgttatttcacttaacctttttatcttttaacatgaaggactcatacaggttgataagaaaccagtgacataaacagaccaaaaaatgatcagatctttcaaattagcaaaaaaataatattttttaaacaatgggtgaaaatacagtgtaacagtaccaattatcaacatgtgttgagaaccagaaaaatgttctttttctttgatcagcaacactatttgggaaaatctatcctcagggcctagcctggggccctggcacacagtaggcactcaacgaatatttgctgaacacacaaatacttatgatattttaaaaaattggcaacaatctgatacctaacaatagagggattaaatattatggaactgttaaataagatgcttatgaataccatgcagtaagatgggcaatatttatgccataagctttaatgaaacaaatgggtattaaatgtatgataaggttataaattactttttaaaagattacagggaaaaaaattgaaagatatacactgaaatgttttttgctcacagtggtgacaaggtttctcagcactggcactgttgacgttttaggctgtatgtctttgctgtgggaggctggcctgtgcactgcagggtgtttggcagcactcttggcctctgcccctagatagcaatagcagtcctccctcaaccagcccaattttgacaaccaaaaatgtttccaggcatcaccagatgctccctgggtgagagtgatgaaatagtaggggattttccccttcttttcttattttctgtaattccattatattactttaataataaagaaaaaaacataaaaaataaacgaatgttattattctacgtcagtttggatgtttggactccattttggggttctttccattatatcacttggtctgctaaacattctacggtttggtaaggtgaagtgattcatgaaattttggttttatttttttcctgatactaaaaataaaacattctttcacttggaaatttggacacagaacaccaaaaaaaatccataatctcatctctctttttctgtcttttccttccttttttccctttaaaaacaataaagagtgaaacctacctgttctccctctaatttaattcctaaatataatcactgtcaatatcttggacatttcctgtgtctaaacacacacacacacttttttttttcagcaaaagtggatttctgctacatgtagtgttctgcaacttactttctatgtgtttacaaaatcagtacatgtacatatgctgaattcagtccttaatggtattatattttgtgaatataccaaaatttgtttaaccacttagacaatctaggatattctcagtttgctgttatgagcaatgctcttcctttacatatacagacatatatatatatatgtgtgtgtgtgtgtttttgttttagtaggatagatttctaggagagggtgaaaggtcttatgacatccgcatttacgattgtaataggaagtatcaaagtgccccctaaagaaaaaaatcctcccattagtgggtaagaaagcctatttgttcatatcttcacaaacactaaatattagaaatatttacaattgtggtcaagctcataagtgaaaatggtatttcatatcttatattttttattgtgagattgaacatctttcatatgtttacatgtcacctgtatttcttattctctgaactatatgttatgacctttcactttttttcctcatgggttatgtgtagtttgtatagttgtcttattgattgttaggagctatttatatattaggaacattaatctcctgtcttatatatacgtggcatcgattagttgatcatttgtgagttcatgtctgtatacaaagattggagaggcactaagagggaaaacttacctctttcttatcaaagtttgtaaatatatgtataacagaagagggagaaaatattaataaatgcacagattggctgaaatagagtataaatcttttactcccctacttcaacataaactgcaaaaggagagtgacttttctttcactctgacttccgtattcctcatgcttaaaatagtgcctagcacagaagaggtgctcaatcagtgtttgctaaacgaaataattagtcacatttcaagcaggatgactaaatgaagaatagaatctaggcagatactctggaagagtggctgtgagtcattcatatcttagtatgaattagtcaaatccaactctctccccttcccactccccactgttagtagaagaatctgtttattgagagaatagatttataatttagaataagtgagaggggcagaagaggagattttgaaggatggcacctgaaggaggactagcatggctgagacagtgaagtggaagccttgaatagctaaagggtaagatgaaagtatttagctgtagggggaaaaagcattgacaggttggaaaagtaaaagtcagattctccttgctctgaaattttgtacagggcaggttctactaggtatgttacaatgcagaaaaaacatgaaataattgagaggaatttggtgcaatattatcttcttggcttcttttgagtgggcagatttttttcacggcctgtaactataataaatttgaaacttctcatcttttagtaacttttttcacttaagtttatgtggctgtgggcaatggaatgaagatattgaacttccaattccctgttgggtttccacaattacaagtcaatcatgactggttattagaagactatttcagttagaaccaccaagtcccatattgtcatattgtatgtttaattattaagtgaagcagtcttcttttcgtgttttccataattagggcattccagaaagatgaggatatttgctgtctttatattcatgacctactggcatttgctgaacggtaagacaccaaatccttccattaggttctatattttaaatattttaaccatgagtttaaaactaaaatgatcatttaaaatgcatgcaattttcttatagagagaacattctattctttcttctactttacacaatggcaaagtcttctttctactttacgcaatgataaagttacctgtgtcattttgtaaaaatatagagaatatagacaaattgaaagacacaaaataatctattacccatttcccagggttaactactgaaaatatctggggaaatggcctgtatgtatacatttatttgtttgctttcaacaaggccaagatcctttgatctttcagtcttggttgctctgtgacatgcctttcctgatgaggatactttaaggaagaattgtaagatacatggaaaatgtcaggctaacacagtactggcatcaccctgtgctctttcctgaactccataccaatgtacttcttgccagaaaactgatcaaaagtttagggaagtaaaaagagatgactgttagaatctaccattccctctatgtaggaagcaaataggtgtcctgtcaaaggacattctggggatgtctacatgaaaccaagtctccctggttgtaaggactccatctccatataatatttatacagtaatatatgtttataaattgtgggggcaacttgtttagctaattttattattctgctattgggacactgtgtctcagcatgagatatagtgtcccaaaacatatttcaagcccattggataaaatatgtgtttagcaagttcttaaatataatgataacataaccgaccagataaagtgatttataaacgctgtgccaattttgtaaatgtttcgaggaattttcccttttctgaagattgtccttctttctttttagcatttactgtcacggttcccaaggacctatatgtggtagagtatggtagcaatatgacaattgaatgcaaattcccagtagaaaaacaattagacctggctgcactaattgtctattgggaaatggaggataagaacattattcaatttgtgcatggagaggaagacctgaaggttcagcatagtagctacagacagagggcccggctgttgaaggaccagctctccctgggaaatgctgcacttcagatcacagatgtgaaattgcaggatgcaggggtgtaccgctgcatgatcagctatggtggtgccgactacaagcgaattactgtgaaagtcaatggtaagaattattatagatgagaggcctgatctttattgaaaacatattccaagtgttgaagacttttcattcttgtaagtccatacttattttcaaacagaacagcatagtctgttcattcattcattcaattcatgaattcattcacataattatccaatttcttgagcacctatttgatagtcactggaaatccagagacaaacaacacagagccatgttctacagtatgtacagttttccaaaaagaatttctagtctttacttttttattacaaatggaatacgtatacttgcaaataattcagatactgtggaagagatcaaatgaattgcaaaagtgtccctcctcccttcaccactatctcccatggcatgcagagagagtaaccattatttgtgtgtccctccagaaatttttttattcaactactatttttttattttattaggtccgtcagttttccttttttgagcctctctatatcaaatgcaaataaatatattcagaacaaaccccactgtaaggttcacattaaaaaagacttgaagtcaccctatgaagacaaaaaataatcacattaagtgtgaaagaacctattcttccagtacaggataagccatacttactgggcatatattcatcttgaaaatctatactgatgttgtcttggggaattgaaaaggaactaggagtgttagttcctcggtattgacccacagttatgttatcaggtcacttgagttcaaagttttgtgttggcactagctaagtaaaggaaaacacctctgctttcattgttgagtttcacagaattgagagctgaaaggatcccaggcaggagcagctaatccaaactcccacaaagaacaaaaatcccccagaggatcttctgttcttatatttcctgcaatggcgtccctgtcatatcccacaatggcctccctgccatttggatatcccttccatatcctgttgaaattactccctaatagtaagctgaaatctgcccctctagttgtagtcttgggattatttcatttacatgatgaccttttaatatttgactagaattaaatcatctccccttggtctttccattcctgggctaactaccatcaatctgagggctaacaatacaagtagaaaaagtatacatttgtcactgatcactgatcaattattaatcaatgatcactgataactataaactcaaaaacaaaatcatgtggggattaagagaaatgtatcagttttatgttgtatttctggtccctgatactggctcaggtaatgccactattgtcaagaagataccacttgtaaagtagatttaattttcattatattttaccatatgcttctccattcatgacatctcttgagatgttgtggtttatactttcagtttttctccagtccatccgcaaatatcaggcatctactgtgttccaagatattaaagaaatcatcatgacttagcctcatcaacagcattgctagatctgggatggaaaggaagagtataatcctggcagtcaggaagaaggcagcataaagtataagtttctgcttccaaaaaaggtctctcatcagcctgtagggagtgtgtagggaagggacagctgtccttgtagtagggaagggttttattcaggtcgtctgggctccataatatcccttgtgtatctgcagtctcctttgccatggatcaacacaataggaaatcttccggcactgatggtttttccaagggggagttcttcctggagcaaagcaaatgaccaaccaggtttgaggacctgatttgtttgacaattccattttgtattgtaaattacttaattggcattctactcccaatccatcttgtcatttgcatacagtggttttgggattgagttcagctataccaaaagtctgaaccttctgcacttagaacaaggcaaccaccaagcttcacttgcactgaggccgtgtctccaatggaaatgaggcagctggcttgcaggagcttcccaactcagggaagtagaactcctgagtcacctccatatgcaaatgatttcacagtaatgctgttgaacttcacttcccatcacagcaaatgtgtggtaacatagcttccccacaggagtttactcaccatggtattttaaaggtgaaacatttcaaaactgaaatttgaaagaatttagttttggattcactcaattatcactatcacttcgggtgttattgcacctttcttgtttgtgagtttaaatgccagactctcaggccactaactttcaattaaaagtgtttttctttaatcgctgaacctaacagcagggaaaacgaaatgttcattcagactttcagaaccttcaatgagattaggcagctgaaagatcaaagtgttgcatagttgtcccgataaagctatttggatcatatggaccaaatcgactgctgtcattccccaccaaccccatctctccccaaaattcccagccctgtttaagtgttctctgtagcatttatctctatctagtatattgtgtagcatatcatatcatacttttctgttttgtttattgtctctctcctcctagaatataaactccacaagcacaaagatttgggcctgttttataatattgttgcatccccagggcctgatatacagcagagtggtggtacgaaaagagcacacaaaaaaatatttgttgagtcaatgaatgaatgatttcctcaaataggattagcctaaaattttggaaacatgaacagatttggatatgtgaaaatttatttccagactgttcatcaggaactgttagcagcttctaaagggtacactggagcagcagtagtaaaaggaggaagaggagcagctctgctactgctactatcgagtactactacaattagcacttgcttattctgtgtgttaggccctgtactgaacactctgtctaaattagttcatttcctcctggaaatgactctagggggtaagtgcttcatcatgtaagatgagtatttttcacattttgttgtgtctgaaatctgagtgtgtctttcaatgatggaatctttgattccatgataagtggtattattcccattttaaggatgaggaaactgaggtccaaagaaattaagtaatttgcccaaattcacccagcctagaaaatgataaagctagttctaaacccaagcagattagctctgaagtctgggcccttaataaccactttttattgcctatatttgtacctctggtgtacgtatcaagttatatgttgacttcaaaactatcatgaccttttcttggttttgattgtccaacattagtatagtgttctgggtctgcaaaaattttgattactcatctcatctgtaaaacattttgaactcgtgtgtttgtgcatgcacatttgtgtgtaattataaaaattttactttctgttaatatataagttgtatcataagaaactgccgtttttgaagagcaaaaaaaggttgaatgttaccagttacatctggttcaacctaatagacatttgtacaaaaacagacattttaagaggttgaaataaaaatttaataaacaatattttcagtttttactaattgtgatgcttcactatcattagctaatatgtcaaggcataatataccttagggtgaactttatcattaacaaaggtggatggtgtcaataatcttgaggtttgtgtttttttatataacactgcgaggtctaattaagtacttactgtttaccacctcatacagtggccgataaaaagtgtcacttctgctgtttcctctgggttgtgcttgaattattagtattatcttcagtcctcagtttctttgtgggaaactttttaattagttgtttaattttgtaagatggttagtttagtcaaaattagataagagaatttgaaaatccgtagctaccccaaagcaacctacacataagaactattatttttgtgttttgaaatcataattttattgatttccagtgtttccactggtagtggtttcattgatataggagtatcaaaacatcactcattatttatttcagtttcatttgatcctagccgttttgtattaactctctgtgaagaaattacctcacaaatctattgctgtccttggtaaaggaatggagaattaaggctctagatcattagtggttacactatagtattagaagtaaaaaaaagattataccaacaaaataagaacatgttaatgtacttgtaatgaataaacatgaataaagctcttatgctatataggtgcactaaacaatctactagaattgtcagcaaactacgtatcttaatcctgaaagggtcccaaaccaatgatctaaaattgaatcaaactttcttccttgagcataattacttaaatgatttattaaaatagccagcatttaaaagcttaaaatgtaaatatcataatgtggtatcctagatagcatcccagaacagaaaaaggatattagggaaaaactggaggaatggaataaattatgcagtttagttattaataatgtactaacgtccttagttatgacgattgtaccatggtaatgtaagatactaacaatagaggaaaccgggtaaggagtatacagtaactctatactatctttgcaacttttttgtaaatttaaaacttctaaaataaagaacaaatttaaacattaaaaagtatcaccaggaacatatatcactgtttacagatgaaatactatgtattttcatatctaatttctgatcattgacttcaaatcagaaaagtgaatgacacctcaaaatcaggttttctgtttactgaagtctaagaaaagaaagcataccagctggagagattcatgtttataaagacagatttataacaacaaaaataaaatatccaagaataaatttaagaagaagcactttactgagaaacatatgaaaacctgaacaaatggagagggatattttgtatttgaatagaaagacttctggtttaaagataattctctttaaattattttttgtagaaatttaaggggtacaagagcagtgttgtcacatggatatattacatagtggtgaagtctggggttttagtgtaaattaatctttacattttgtttgagcccaataaatgtaccaacatgatttttatagaaagatagtcattcctattaatccaaacttgtcccaactttgaattgaattgaggcagagctagcaggtgttccccacggctgaggcatctgaacattaagcatatccctctgagaaccagcctgcattgatactctttctaatgtggacagcatcaagctatgtacgtagttctgtgctcagcaaaagccctgacttctttttgtttatgtcctagccccatacaacaaaatcaaccaaagaattttggttgtggatccagtcacctctgaacatgaactgacatgtcaggctgagggctaccccaaggccgaagtcatctggacaagcagtgaccatcaagtcctgagtggtaagaccaccaccaccaattccaagagagaggagaagcttttcaatgtgaccagcacactgagaatcaacacaacaactaatgagattttctactgcacttttaggagattagatcctgaggaaaaccatacagctgaattggtcatcccaggtaatattctgaatgtgtccattaaaatatgtctaacactgtcccctagcacctagcatgatgtctgcctatcatagtcattcagtgattgttgaataaatgaatgaatgaataacactatgtttacaaaatatatcctaattcctcacctccattcatccaaaccatattgttacttaataaacattcagcagatatttatggaatataccttttgttccatgcattgtagtactcattggatacacatagaataataagactcagttcacactcttcaggaaacagataaaaaactaagaaacaaacaaaaaacaggcaatccaacaccatgtgggaaatgctttcatagccgggaaacctggggaatacctgagaggaatactcaattcaggccttgtttcaggaatccaaatcctggcacatcagagctgcttccctctttccagggtggcaggaaataaatggaacatatttttctatcttatgccaaacatgagggaccctttctccccggtgcctctcccaaggtagtctacaatatttcaactctagcagtctgcttagtgcatagaacatgaggctgtgtgtccctgggcaaattactagacttctgtgtgcttcactttccctgtaggattataatctactgagcaagcttattgtaagggtcagattagcaacagtgtatgaaaatgatttgagaccattgcctgcacaaattcaactatttttttttatctcactactctacagaagtaggtagggtgggagacagagtctgatgagaggctcagaatgtgaaagaaagtgaggcgagtgagcatgatatttaatataaacacaaagatattctgagaagagctgctcactgccccctcccccaatacatgttgataggaaaatgccacgtacttcagcaaaaacaactgaaaaattagatagaaaagtcaatcaataggaaaagataatccaggacggtgttgtgaacagaaagagggggaaaaaactttagaaaatgatggggatgctcttactggggtacgagtcctcaggtattgaactggctttcagtaaaagctagattagtgggttcctgccatttacaagctgttttatgacaacttacttgttgggtggcctacagtaactcacctaactgcactgagtctgtttcctcatctgtaaattggggatttttttttaaatacctggcatgcctaactcataaagttgttctgaaactgaaataaaacatacgtgaacaggcattgtaaactgtaagttacggaaaaagctggctgttgttgtgtctttaaagtttcacctgggtagtcaaagatggatcatgggtctcagtggagagctgagccaggcaggagctgactaagggtgagaggtgggagttagcagcctctgaacatctgtgtaccatgggaccccctttcctcctgcatggtaccccagacaaggagcctagtaagagatactaatggcttgttgtccagagatgttcaaactgcagagaaagataagacaacaagcattggcctccaatcatgatgacagataggaggaggtgggagctccttagcagtgctggttggccttccatgttctactgtgggccatctctgccatgtactgtaggctactagcttctatattaaagaatgcaagaggggccaggagcggaggctcatgcctgtaatctcagcactttgggaggccaaggtgggcagatcacttgaggtcaggagtttgtgaccagcctggccaacatggtgaaactctgcctttactaaaaatataaaaattagctgggtgtggtggtgtgcacctgtaatcccagctactcgggagactgaggcacaagaattgcttgaacctgggaggcggaagttgcagtgagcccagattgcgccactgcactccaccctgggcaacagagaaagactctgcctcaaaaaaaaaaaaaaaaagcaagaggaagtgaaataatcaaggccgccatttaatagtgagcagccactccatgtggtactgtgcaagcacattataaatattagcctcacaagaaatgtattagcatttgtattttgtacactggttaagtatcttgcccaagacctcaaaactggttaagggcagcagaatttagccccagcaccaccttttcaaagcctgggcttctcacacttctccatgctgttcccattttaacacaggtatctcgccattccagccactcaaactttggcatttaagaaaattatcctaaagctaaactaaacttcaaggatgaccattctcctgaccccttcccatcaaaattttatctttagtcagtttgttttcgttttgttttgtttttcagaactacctctggcacatcctccaaatgaaaggactcacttggtaattctgggagccatcttattatgccttggtgtagcactgacattcatcttccgtttaagaaaaggtagtatttccttaattgcagtggtctccactgggggtgaggaaggggtgagaattggatcatggctgcaaggaaacccgacttaacctctgcaaggtggtgcaaaggcattccactgttcaacagcaattatattgaagctgagtgggatcactgggtgaagatgaagcgtaaggggtgaggggcaggagaatgggtatggatggaggtagaagatgcagtgtcatacagtttttttctatcatgaaaataaccacagacttacagaagagaaagagctaaaatgcccgtcattttcagttgcattttagtcttgcattagttgcaaccagctggtttctgggtaccctaagtaataaaaatagttcctctgtagaactgtagtatgtttaccatagagtattttgcaaaatttttggtagaggatgttacataatttgcatgtgttcatttctccatttacctgtgggaacaattaaaatccaggaaaatgagtatattcaaataatttcctcccatttaagatgagtcagagtaaataattcctccaatacttagagaagtataccaagagatccagtgatggtatagagttgtctgatgttaaatagggaagtagaatatggaaggggattccaatagtcgttgaaaaattccccataaccccttacatgggggaaagtagtgttaactgagagagtagagataagctgtttccaaaaattatattcttaacaggactgagatagccagaatataaggatcaagtttcaatgacagtaagatcctgagatggagttgatttgcacaaagaaataattgttgccagcatgcattttgaatatttctctggaaaaaaagattagttggcagtagaaatggatagaaatcaatagatattaaaatacctcagaatttggttcatctctgggaaaagatgaaaaataaaagtgtatactcctcaagaacatctaggatcaaaagcatgtgccctacactattgaattaattaacctcataagttgggacctgtggaataaggatgtccaccagacttcctagggattacaaatgtttcacagaacttgaaatttaaacttgggtcactgtatgggatgtagagctgtgctatatggaaataaaaatgatttctttttctcaagggagaatgatggatgtgaaaaaatgtggcatccaagatacaaactcaaagaagcaaagtggtaagaatatcagaaggaattgggaagtaaaagtcaaaggaaacaaaaagctaaagcaataacaaagagaaatccatcagtcataatctcctctccttttaaagaatgctggttcccctttgcctcacagctaacacaagaactcctccaccgtctgaggaggtttaggagcagggaaggggaaggagtcagcttcatttgctaatcttctgttgccctgcaccctagcagctccttgcagcaggggacaaggatgacttaggtggatggataattaattgattctaaaatattgtgtgtcagtattgtaatactatgttaattgcaccatgcacggtatctcatttaatcccccaccccttgccattaccaaagagagagagagagagagagagagaaatactagaatttatcctcattttacagtagagaaaacagagggtcaagaagataatgtaaagtgcccaagaacacacagctgatcacaaaaatcaagcttgggggccattagcctaaccacagacccttactcttaacccatctgcttcaatccattttgctacaaatgtttacatttataagcagggcagaaaaacctcatccaggttattgaactaagaagaaagttatattaaggtttctaatttttttaatgtagttagaaaccaaacttaacaatgagcccaagtttaaagcagtctaattaacctggacaagctcaggcaagtttcattctgtggcccatagcatcatctgtgttgtaaagctaagtagcaaatgttgtttgggtcatgctgggggacaagccatcccaatttgctcaggactgaggggttttccaggatatcatgtaaggataattgggtacaaatataacctgctgctttctctcatttcaaatttatcatttatcatatcagcaactatgagttatgttttttattagatttcttgttactttttccccagaccacttcccatgaaattaatatactattatcactctccagatacacatttggaggagacgtaatccagcattggaacttctgatcttcaagcagggattctcaacctgtggtttaggggttcatcggggctgagcgtgacaagaggaaggaatgggcccgtgggatgcaggcaatgtgggacttaaaaggcccaagcactgaaaatggaacctggcgaaagcagaggaggagaatgaagaaagatggagtcaaacagggagcctggagggagaccttgatactttcaaatgcctgaggggctcatcgacgcctgtgacagggagaaaggatacttctgaacaaggagcctccaagcaaatcatccattgctcatcctaggaagacgggttgagaatccctaatttgagggtcagttcctgcagaagtgccctttgcctccactcaatgcctcaatttgttttctgcatgactgagagtctcagtgttggaacgggacagtatttatgtatgagtttttcctatttattttgagtctgtgaggtcttcttgtcatgtgagtgtggttgtgaatgatttcttttgaagatatattgtagtagatgttacaattttgtcgccaaactaaacttgctgcttaatgatttgctcacatctagtaaaacatggagtatttgtaaggtgcttggtctcctctataactacaagtatacattggaagcataaagatcaaaccgttggttgcataggatgtcacctttatttaacccattaatactctggttgacctaatcttattctcagacctcaagtgtctgtgcagtatctgttccatttaaatatcagctttacaattatgtggtagcctacacacataatctcatttcatcgctgtaaccaccctgttgtgataaccactattattttacccatcgtacagctgaggaagcaaacagattaagtaacttgcccaaaccagtaaatagcagacctcagactgccacccactgtccttttataatacaatttacagctatattttactttaagcaattcttttattcaaaaaccatttattaagtgcccttgcaatatcaatcgctgtgccaggcattgaatctacagatgtgagcaagacaaagtacctgtcctcaaggagctcatagtataatgaggagattaacaagaaaatgtattattacaatttagtccagtgtcatagcataaggatgatgcgaggggaaaacccgagcagtgttgccaagaggaggaaataggccaatgtggtctgggacggttggatatacttaaacatcttaataatcagagtaattttcatttacaaagagaggtcggtacttaaaataaccctgaaaaataacactggaattccttttctagcattatatttattcctgatttgcctttgccatataatctaatgcttgtttatatagtgtctggtattgtttaacagttctgtcttttctatttaaatgccactaaattttaaattcatacctttccatgattcaaaattcaaaagatcccatgggagatggttggaaaatctccacttcatcctccaagccattcaagtttcctttccagaagcaactgctactgcctttcattcatatgttcttctaaagatagtctacatttggaaatgtatgttaaaagcacgtatttttaaaatttttttcctaaatagtaacacattgtatgtctgctgtgtactttgctatttttatttattttagtgtttcttatatagcagatggaatgaatttgaagttcccagggctgaggatccatgccttctttgtttctaagttatctttcccatagcttttcattatctttcatatgatccagtatatgttaaatatgtcctacatatacatttagacaaccaccatttgttaagtatttgctctaggacagagtttggatttgtttatgtttgctcaaaaggagacccatgggctctccagggtgcactgagtcaatctagtcctaaaaagcaatcttattattaactctgtatgacagaatcatgtctggaacttttgttttctgctttctgtcaagtataaacttcactttgatgctgtacttgcaaaatcacattttctttctggaaattccggcagtgtaccttgactgctagctaccctgtgccagaaaagcctcattcgttgtgcttgaacccttgaatgccaccagctgtcatcactacacagccctcctaagaggcttcctggaggtttcgagattcagatgccctgggagatcccagagtttcctttccctcttggccatattctggtgtcaatgacaaggagtaccttggctttgccacatgtcaaggctgaagaaacagtgtctccaacagagctccttgtgttatctgtttgtacatgtgcatttgtacagtaattggtgtgacagtgttctttgtgtgaattacaggcaagaattgtggctgagcaaggcacatagtctactcagtctattcctaagtcctaactcctccttgtggtgttggatttgtaaggcactttatcccttttgtctcatgtttcatcgtaaatggcataggcagagatgatacctaattctgcatttgattgtcactttttgtacctgcattaatttaataaaatattcttatttattttgttacttggtacaccagcatgtccattttcttgtttattttgtgtttaataaaatgttcagtttaacatcccagtggagaaagtt

SEQ ID NO: 73 - DNA, 20023 bp, Homo sapiens; identical to SEQ ID NO: 71

SEQ ID NO: 74 - DNA, 11753 bp, Homo sapiens
atgaggatatttgctgtctttatattcatgacctactggcatttgctgaacggtaagacaccaaatccttccattaggttctatattttaaatattttaaccatgagtttaaaactaaaatgatcatttaaaatgcatgcaattttcttatagagagaacattctattctttcttctactttacacaatggcaaagtcttctttctactttacgcaatgataaagttacctgtgtcattttgtaaaaatatagagaatatagacaaattgaaagacacaaaataatctattacccatttcccagggttaactactgaaaatatctggggaaatggcctgtatgtatacatttatttgtttgctttcaacaaggccaagatcctttgatctttcagtcttggttgctctgtgacatgcctttcctgatgaggatactttaaggaagaattgtaagatacatggaaaatgtcaggctaacacagtactggcatcaccctgtgctctttcctgaactccataccaatgtacttcttgccagaaaactgatcaaaagtttagggaagtaaaaagagatgactgttagaatctaccattccctctatgtaggaagcaaataggtgtcctgtcaaaggacattctggggatgtctacatgaaaccaagtctccctggttgtaaggactccatctccatataatatttatacagtaatatatgtttataaattgtgggggcaacttgtttagctaattttattattctgctattgggacactgtgtctcagcatgagatatagtgtcccaaaacatatttcaagcccattggataaaatatgtgtttagcaagttcttaaatataatgataacataaccgaccagataaagtgatttataaacgctgtgccaattttgtaaatgtttcgaggaattttcccttttctgaagattgtccttctttctttttagcatttactgtcacggttcccaaggacctatatgtggtagagtatggtagcaatatgacaattgaatgcaaattcccagtagaaaaacaattagacctggctgcactaattgtctattgggaaatggaggataagaacattattcaatttgtgcatggagaggaagacctgaaggttcagcatagtagctacagacagagggcccggctgttgaaggaccagctctccctgggaaatgctgcacttcagatcacagatgtgaaattgcaggatgcaggggtgtaccgctgcatgatcagctatggtggtgccgactacaagcgaattactgtgaaagtcaatggtaagaattattatagatgagaggcctgatctttattgaaaacatattccaagtgttgaagacttttcattcttgtaagtccatacttattttcaaacagaacagcatagtctgttcattcattcattcaattcatgaattcattcacataattatccaatttcttgagcacctatttgatagtcactggaaatccagagacaaacaacacagagccatgttctacagtatgtacagttttccaaaaagaatttctagtctttacttttttattacaaatggaatacgtatacttgcaaataattcagatactgtggaagagatcaaatgaattgcaaaagtgtccctcctcccttcaccactatctcccatggcatgcagagagagtaaccattatttgtgtgtccctccagaaatttttttattcaactactatttttttattttattaggtccgtcagttttccttttttgagcctctctatatcaaatgcaaataaatatattcagaacaaaccccactgtaaggttcacattaaaaaagacttgaagtcaccctatgaagacaaaaaataatcacattaagtgtgaaagaacctattcttccagtacaggataagccatacttactgggcatatattcatcttgaaaatctatactgatgttgtcttggggaattgaaaaggaactaggagtgttagttcctcggtattgacccacagttatgttatcaggtcacttgagttcaaagttttgtgttggcactagctaagtaaaggaaaacacctctgctttcattgttgagtttcacagaattgagagctgaaaggatcccaggcaggagcagctaatccaaactcccacaaagaacaaaaatcccccagaggatcttctgttcttatatttcctgcaatggcgtccctgtcatatcccacaatggcctccctgccatttggatatcccttccatatcctgttgaaattactccctaatagtaagctgaaatctgcccctctagttgtagtcttgggattatttcatttacatgatgaccttttaatatttgactagaattaaatcatctccccttggtctttccattcctgggctaactaccatcaatctgagggctaacaatacaagtagaaaaagtatacatttgtcactgatcactgatcaattattaatcaatgatcactgataactataaactcaaaaacaaaatcatgtggggattaagagaaatgtatcagttttatgttgtatttctggtccctgatactggctcaggtaatgccactattgtcaagaagataccacttgtaaagtagatttaattttcattatattttaccatatgcttctccattcatgacatctcttgagatgttgtggtttatactttcagtttttctccagtccatccgcaaatatcaggcatctactgtgttccaagatattaaagaaatcatcatgacttagcctcatcaacagcattgctagatctgggatggaaaggaagagtataatcctggcagtcaggaagaaggcagcataaagtataagtttctgcttccaaaaaaggtctctcatcagcctgtagggagtgtgtagggaagggacagctgtccttgtagtagggaagggttttattcaggtcgtctgggctccataatatcccttgtgtatctgcagtctcctttgccatggatcaacacaataggaaatcttccggcactgatggtttttccaagggggagttcttcctggagcaaagcaaatgaccaaccaggtttgaggacctgatttgtttgacaattccattttgtattgtaaattacttaattggcattctactcccaatccatcttgtcatttgcatacagtggttttgggattgagttcagctataccaaaagtctgaaccttctgcacttagaacaaggcaaccaccaagcttcacttgcactgaggccgtgtctccaatggaaatgaggcagctggcttgcaggagcttcccaactcagggaagtagaactcctgagtcacctccatatgcaaatgatttcacagtaatgctgttgaacttcacttcccatcacagcaaatgtgtggtaacatagcttccccacaggagtttactcaccatggtattttaaaggtgaaacatttcaaaactgaaatttgaaagaatttagttttggattcactcaattatcactatcacttcgggtgttattgcacctttcttgtttgtgagtttaaatgccagactctcaggccactaactttcaattaaaagtgtttttctttaatcgctgaacctaacagcagggaaaacgaaatgttcattcagactttcagaaccttcaatgagattaggcagctgaaagatcaaagtgttgcatagttgtcccgataaagctatttggatcatatggaccaaatcgactgctgtcattccccaccaaccccatctctccccaaaattcccagccctgtttaagtgttctctgtagcatttatctctatctagtatattgtgtagcatatcatatcatacttttctgttttgtttattgtctctctcctcctagaatataaactccacaagcacaaagatttgggcctgttttataatattgttgcatccccagggcctgatatacagcagagtggtggtacgaaaagagcacacaaaaaaatatttgttgagtcaatgaatgaatgatttcctcaaataggattagcctaaaattttggaaacatgaacagatttggatatgtgaaaatttatttccagactgttcatcaggaactgttagcagcttctaaagggtacactggagcagcagtagtaaaaggaggaagaggagcagctctgctactgctactatcgagtactactacaattagcacttgcttattctgtgtgttaggccctgtactgaacactctgtctaaattagttcatttcctcctggaaatgactctagggggtaagtgcttcatcatgtaagatgagtatttttcacattttgttgtgtctgaaatctgagtgtgtctttcaatgatggaatctttgattccatgataagtggtattattcccattttaaggatgaggaaactgaggtccaaagaaattaagtaatttgcccaaattcacccagcctagaaaatgataaagctagttctaaacccaagcagattagctctgaagtctgggcccttaataaccactttttattgcctatatttgtacctctggtgtacgtatcaagttatatgttgacttcaaaactatcatgaccttttcttggttttgattgtccaacattagtatagtgttctgggtctgcaaaaattttgattactcatctcatctgtaaaacattttgaactcgtgtgtttgtgcatgcacatttgtgtgtaattataaaaattttactttctgttaatatataagttgtatcataagaaactgccgtttttgaagagcaaaaaaaggttgaatgttaccagttacatctggttcaacctaatagacatttgtacaaaaacagacattttaagaggttgaaataaaaatttaataaacaatattttcagtttttactaattgtgatgcttcactatcattagctaatatgtcaaggcataatataccttagggtgaactttatcattaacaaaggtggatggtgtcaataatcttgaggtttgtgtttttttatataacactgcgaggtctaattaagtacttactgtttaccacctcatacagtggccgataaaaagtgtcacttctgctgtttcctctgggttgtgcttgaattattagtattatcttcagtcctcagtttctttgtgggaaactttttaattagttgtttaattttgtaagatggttagtttagtcaaaattagataagagaatttgaaaatccgtagctaccccaaagcaacctacacataagaactattatttttgtgttttgaaatcataattttattgatttccagtgtttccactggtagtggtttcattgatataggagtatcaaaacatcactcattatttatttcagtttcatttgatcctagccgttttgtattaactctctgtgaagaaattacctcacaaatctattgctgtccttggtaaaggaatggagaattaaggctctagatcattagtggttacactatagtattagaagtaaaaaaaagattataccaacaaaataagaacatgttaatgtacttgtaatgaataaacatgaataaagctcttatgctatataggtgcactaaacaatctactagaattgtcagcaaactacgtatcttaatcctgaaagggtcccaaaccaatgatctaaaattgaatcaaactttcttccttgagcataattacttaaatgatttattaaaatagccagcatttaaaagcttaaaatgtaaatatcataatgtggtatcctagatagcatcccagaacagaaaaaggatattagggaaaaactggaggaatggaataaattatgcagtttagttattaataatgtactaacgtccttagttatgacgattgtaccatggtaatgtaagatactaacaatagaggaaaccgggtaaggagtatacagtaactctatactatctttgcaacttttttgtaaatttaaaacttctaaaataaagaacaaatttaaacattaaaaagtatcaccaggaacatatatcactgtttacagatgaaatactatgtattttcatatctaatttctgatcattgacttcaaatcagaaaagtgaatgacacctcaaaatcaggttttctgtttactgaagtctaagaaaagaaagcataccagctggagagattcatgtttataaagacagatttataacaacaaaaataaaatatccaagaataaatttaagaagaagcactttactgagaaacatatgaaaacctgaacaaatggagagggatattttgtatttgaatagaaagacttctggtttaaagataattctctttaaattattttttgtagaaatttaaggggtacaagagcagtgttgtcacatggatatattacatagtggtgaagtctggggttttagtgtaaattaatctttacattttgtttgagcccaataaatgtaccaacatgatttttatagaaagatagtcattcctattaatccaaacttgtcccaactttgaattgaattgaggcagagctagcaggtgttccccacggctgaggcatctgaacattaagcatatccctctgagaaccagcctgcattgatactctttctaatgtggacagcatcaagctatgtacgtagttctgtgctcagcaaaagccctgacttctttttgtttatgtcctagccccatacaacaaaatcaaccaaagaattttggttgtggatccagtcacctctgaacatgaactgacatgtcaggctgagggctaccccaaggccgaagtcatctggacaagcagtgaccatcaagtcctgagtggtaagaccaccaccaccaattccaagagagaggagaagcttttcaatgtgaccagcacactgagaatcaacacaacaactaatgagattttctactgcacttttaggagattagatcctgaggaaaaccatacagctgaattggtcatcccaggtaatattctgaatgtgtccattaaaatatgtctaacactgtcccctagcacctagcatgatgtctgcctatcatagtcattcagtgattgttgaataaatgaatgaatgaataacactatgtttacaaaatatatcctaattcctcacctccattcatccaaaccatattgttacttaataaacattcagcagatatttatggaatataccttttgttccatgcattgtagtactcattggatacacatagaataataagactcagttcacactcttcaggaaacagataaaaaactaagaaacaaacaaaaaacaggcaatccaacaccatgtgggaaatgctttcatagccgggaaacctggggaatacctgagaggaatactcaattcaggccttgtttcaggaatccaaatcctggcacatcagagctgcttccctctttccagggtggcaggaaataaatggaacatatttttctatcttatgccaaacatgagggaccctttctccccggtgcctctcccaaggtagtctacaatatttcaactctagcagtctgcttagtgcatagaacatgaggctgtgtgtccctgggcaaattactagacttctgtgtgcttcactttccctgtaggattataatctactgagcaagcttattgtaagggtcagattagcaacagtgtatgaaaatgatttgagaccattgcctgcacaaattcaactatttttttttatctcactactctacagaagtaggtagggtgggagacagagtctgatgagaggctcagaatgtgaaagaaagtgaggcgagtgagcatgatatttaatataaacacaaagatattctgagaagagctgctcactgccccctcccccaatacatgttgataggaaaatgccacgtacttcagcaaaaacaactgaaaaattagatagaaaagtcaatcaataggaaaagataatccaggacggtgttgtgaacagaaagagggggaaaaaactttagaaaatgatggggatgctcttactggggtacgagtcctcaggtattgaactggctttcagtaaaagctagattagtgggttcctgccatttacaagctgttttatgacaacttacttgttgggtggcctacagtaactcacctaactgcactgagtctgtttcctcatctgtaaattggggatttttttttaaatacctggcatgcctaactcataaagttgttctgaaactgaaataaaacatacgtgaacaggcattgtaaactgtaagttacggaaaaagctggctgttgttgtgtctttaaagtttcacctgggtagtcaaagatggatcatgggtctcagtggagagctgagccaggcaggagctgactaagggtgagaggtgggagttagcagcctctgaacatctgtgtaccatgggaccccctttcctcctgcatggtaccccagacaaggagcctagtaagagatactaatggcttgttgtccagagatgttcaaactgcagagaaagataagacaacaagcattggcctccaatcatgatgacagataggaggaggtgggagctccttagcagtgctggttggccttccatgttctactgtgggccatctctgccatgtactgtaggctactagcttctatattaaagaatgcaagaggggccaggagcggaggctcatgcctgtaatctcagcactttgggaggccaaggtgggcagatcacttgaggtcaggagtttgtgaccagcctggccaacatggtgaaactctgcctttactaaaaatataaaaattagctgggtgtggtggtgtgcacctgtaatcccagctactcgggagactgaggcacaagaattgcttgaacctgggaggcggaagttgcagtgagcccagattgcgccactgcactccaccctgggcaacagagaaagactctgcctcaaaaaaaaaaaaaaaaagcaagaggaagtgaaataatcaaggccgccatttaatagtgagcagccactccatgtggtactgtgcaagcacattataaatattagcctcacaagaaatgtattagcatttgtattttgtacactggttaagtatcttgcccaagacctcaaaactggttaagggcagcagaatttagccccagcaccaccttttcaaagcctgggcttctcacacttctccatgctgttcccattttaacacaggtatctcgccattccagccactcaaactttggcatttaagaaaattatcctaaagctaaactaaacttcaaggatgaccattctcctgaccccttcccatcaaaattttatctttagtcagtttgttttcgttttgttttgtttttcagaactacctctggcacatcctccaaatgaaaggactcacttggtaattctgggagccatcttattatgccttggtgtagcactgacattcatcttccgtttaagaaaaggtagtatttccttaattgcagtggtctccactgggggtgaggaaggggtgagaattggatcatggctgcaaggaaacccgacttaacctctgcaaggtggtgcaaaggcattccactgttcaacagcaattatattgaagctgagtgggatcactgggtgaagatgaagcgtaaggggtgaggggcaggagaatgggtatggatggaggtagaagatgcagtgtcatacagtttttttctatcatgaaaataaccacagacttacagaagagaaagagctaaaatgcccgtcattttcagttgcattttagtcttgcattagttgcaaccagctggtttctgggtaccctaagtaataaaaatagttcctctgtagaactgtagtatgtttaccatagagtattttgcaaaatttttggtagaggatgttacataatttgcatgtgttcatttctccatttacctgtgggaacaattaaaatccaggaaaatgagtatattcaaataatttcctcccatttaagatgagtcagagtaaataattcctccaatacttagagaagtataccaagagatccagtgatggtatagagttgtctgatgttaaatagggaagtagaatatggaaggggattccaatagtcgttgaaaaattccccataaccccttacatgggggaaagtagtgttaactgagagagtagagataagctgtttccaaaaattatattcttaacaggactgagatagccagaatataaggatcaagtttcaatgacagtaagatcctgagatggagttgatttgcacaaagaaataattgttgccagcatgcattttgaatatttctctggaaaaaaagattagttggcagtagaaatggatagaaatcaatagatattaaaatacctcagaatttggttcatctctgggaaaagatgaaaaataaaagtgtatactcctcaagaacatctaggatcaaaagcatgtgccctacactattgaattaattaacctcataagttgggacctgtggaataaggatgtccaccagacttcctagggattacaaatgtttcacagaacttgaaatttaaacttgggtcactgtatgggatgtagagctgtgctatatggaaataaaaatgatttctttttctcaagggagaatgatggatgtgaaaaaatgtggcatccaagatacaaactcaaagaagcaaagtggtaagaatatcagaaggaattgggaagtaaaagtcaaaggaaacaaaaagctaaagcaataacaaagagaaatccatcagtcataatctcctctccttttaaagaatgctggttcccctttgcctcacagctaacacaagaactcctccaccgtctgaggaggtttaggagcagggaaggggaaggagtcagcttcatttgctaatcttctgttgccctgcaccctagcagctccttgcagcaggggacaaggatgacttaggtggatggataattaattgattctaaaatattgtgtgtcagtattgtaatactatgttaattgcaccatgcacggtatctcatttaatcccccaccccttgccattaccaaagagagagagagagagagagagagaaatactagaatttatcctcattttacagtagagaaaacagagggtcaagaagataatgtaaagtgcccaagaacacacagctgatcacaaaaatcaagcttgggggccattagcctaaccacagacccttactcttaacccatctgcttcaatccattttgctacaaatgtttacatttataagcagggcagaaaaacctcatccaggttattgaactaagaagaaagttatattaaggtttctaatttttttaatgtagttagaaaccaaacttaacaatgagcccaagtttaaagcagtctaattaacctggacaagctcaggcaagtttcattctgtggcccatagcatcatctgtgttgtaaagctaagtagcaaatgttgtttgggtcatgctgggggacaagccatcccaatttgctcaggactgaggggttttccaggatatcatgtaaggataattgggtacaaatataacctgctgctttctctcatttcaaatttatcatttatcatatcagcaactatgagttatgttttttattagatttcttgttactttttccccagaccacttcccatgaaattaatatactattatcactctccagatacacatttggaggagacgtaatcca

SEQ ID NO: 75 - DNA, 5855 bp, Homo sapiens
ggtgccgactacaagcgaattactgtgaaagtcaatggtaagaattattatagatgagaggcctgatctttattgaaaacatattccaagtgttgaagacttttcattcttgtaagtccatacttattttcaaacagaacagcatagtctgttcattcattcattcaattcatgaattcattcacataattatccaatttcttgagcacctatttgatagtcactggaaatccagagacaaacaacacagagccatgttctacagtatgtacagttttccaaaaagaatttctagtctttacttttttattacaaatggaatacgtatacttgcaaataattcagatactgtggaagagatcaaatgaattgcaaaagtgtccctcctcccttcaccactatctcccatggcatgcagagagagtaaccattatttgtgtgtccctccagaaatttttttattcaactactatttttttattttattaggtccgtcagttttccttttttgagcctctctatatcaaatgcaaataaatatattcagaacaaaccccactgtaaggttcacattaaaaaagacttgaagtcaccctatgaagacaaaaaataatcacattaagtgtgaaagaacctattcttccagtacaggataagccatacttactgggcatatattcatcttgaaaatctatactgatgttgtcttggggaattgaaaaggaactaggagtgttagttcctcggtattgacccacagttatgttatcaggtcacttgagttcaaagttttgtgttggcactagctaagtaaaggaaaacacctctgctttcattgttgagtttcacagaattgagagctgaaaggatcccaggcaggagcagctaatccaaactcccacaaagaacaaaaatcccccagaggatcttctgttcttatatttcctgcaatggcgtccctgtcatatcccacaatggcctccctgccatttggatatcccttccatatcctgttgaaattactccctaatagtaagctgaaatctgcccctctagttgtagtcttgggattatttcatttacatgatgaccttttaatatttgactagaattaaatcatctccccttggtctttccattcctgggctaactaccatcaatctgagggctaacaatacaagtagaaaaagtatacatttgtcactgatcactgatcaattattaatcaatgatcactgataactataaactcaaaaacaaaatcatgtggggattaagagaaatgtatcagttttatgttgtatttctggtccctgatactggctcaggtaatgccactattgtcaagaagataccacttgtaaagtagatttaattttcattatattttaccatatgcttctccattcatgacatctcttgagatgttgtggtttatactttcagtttttctccagtccatccgcaaatatcaggcatctactgtgttccaagatattaaagaaatcatcatgacttagcctcatcaacagcattgctagatctgggatggaaaggaagagtataatcctggcagtcaggaagaaggcagcataaagtataagtttctgcttccaaaaaaggtctctcatcagcctgtagggagtgtgtagggaagggacagctgtccttgtagtagggaagggttttattcaggtcgtctgggctccataatatcccttgtgtatctgcagtctcctttgccatggatcaacacaataggaaatcttccggcactgatggtttttccaagggggagttcttcctggagcaaagcaaatgaccaaccaggtttgaggacctgatttgtttgacaattccattttgtattgtaaattacttaattggcattctactcccaatccatcttgtcatttgcatacagtggttttgggattgagttcagctataccaaaagtctgaaccttctgcacttagaacaaggcaaccaccaagcttcacttgcactgaggccgtgtctccaatggaaatgaggcagctggcttgcaggagcttcccaactcagggaagtagaactcctgagtcacctccatatgcaaatgatttcacagtaatgctgttgaacttcacttcccatcacagcaaatgtgtggtaacatagcttccccacaggagtttactcaccatggtattttaaaggtgaaacatttcaaaactgaaatttgaaagaatttagttttggattcactcaattatcactatcacttcgggtgttattgcacctttcttgtttgtgagtttaaatgccagactctcaggccactaactttcaattaaaagtgtttttctttaatcgctgaacctaacagcagggaaaacgaaatgttcattcagactttcagaaccttcaatgagattaggcagctgaaagatcaaagtgttgcatagttgtcccgataaagctatttggatcatatggaccaaatcgactgctgtcattccccaccaaccccatctctccccaaaattcccagccctgtttaagtgttctctgtagcatttatctctatctagtatattgtgtagcatatcatatcatacttttctgttttgtttattgtctctctcctcctagaatataaactccacaagcacaaagatttgggcctgttttataatattgttgcatccccagggcctgatatacagcagagtggtggtacgaaaagagcacacaaaaaaatatttgttgagtcaatgaatgaatgatttcctcaaataggattagcctaaaattttggaaacatgaacagatttggatatgtgaaaatttatttccagactgttcatcaggaactgttagcagcttctaaagggtacactggagcagcagtagtaaaaggaggaagaggagcagctctgctactgctactatcgagtactactacaattagcacttgcttattctgtgtgttaggccctgtactgaacactctgtctaaattagttcatttcctcctggaaatgactctagggggtaagtgcttcatcatgtaagatgagtatttttcacattttgttgtgtctgaaatctgagtgtgtctttcaatgatggaatctttgattccatgataagtggtattattcccattttaaggatgaggaaactgaggtccaaagaaattaagtaatttgcccaaattcacccagcctagaaaatgataaagctagttctaaacccaagcagattagctctgaagtctgggcccttaataaccactttttattgcctatatttgtacctctggtgtacgtatcaagttatatgttgacttcaaaactatcatgaccttttcttggttttgattgtccaacattagtatagtgttctgggtctgcaaaaattttgattactcatctcatctgtaaaacattttgaactcgtgtgtttgtgcatgcacatttgtgtgtaattataaaaattttactttctgttaatatataagttgtatcataagaaactgccgtttttgaagagcaaaaaaaggttgaatgttaccagttacatctggttcaacctaatagacatttgtacaaaaacagacattttaagaggttgaaataaaaatttaataaacaatattttcagtttttactaattgtgatgcttcactatcattagctaatatgtcaaggcataatataccttagggtgaactttatcattaacaaaggtggatggtgtcaataatcttgaggtttgtgtttttttatataacactgcgaggtctaattaagtacttactgtttaccacctcatacagtggccgataaaaagtgtcacttctgctgtttcctctgggttgtgcttgaattattagtattatcttcagtcctcagtttctttgtgggaaactttttaattagttgtttaattttgtaagatggttagtttagtcaaaattagataagagaatttgaaaatccgtagctaccccaaagcaacctacacataagaactattatttttgtgttttgaaatcataattttattgatttccagtgtttccactggtagtggtttcattgatataggagtatcaaaacatcactcattatttatttcagtttcatttgatcctagccgttttgtattaactctctgtgaagaaattacctcacaaatctattgctgtccttggtaaaggaatggagaattaaggctctagatcattagtggttacactatagtattagaagtaaaaaaaagattataccaacaaaataagaacatgttaatgtacttgtaatgaataaacatgaataaagctcttatgctatataggtgcactaaacaatctactagaattgtcagcaaactacgtatcttaatcctgaaagggtcccaaaccaatgatctaaaattgaatcaaactttcttccttgagcataattacttaaatgatttattaaaatagccagcatttaaaagcttaaaatgtaaatatcataatgtggtatcctagatagcatcccagaacagaaaaaggatattagggaaaaactggaggaatggaataaattatgcagtttagttattaataatgtactaacgtccttagttatgacgattgtaccatggtaatgtaagatactaacaatagaggaaaccgggtaaggagtatacagtaactctatactatctttgcaacttttttgtaaatttaaaacttctaaaataaagaacaaatttaaacattaaaaagtatcaccaggaacatatatcactgtttacagatgaaatactatgtattttcatatctaatttctgatcattgacttcaaatcagaaaagtgaatgacacctcaaaatcaggttttctgtttactgaagtctaagaaaagaaagcataccagctggagagattcatgtttataaagacagatttataacaacaaaaataaaatatccaagaataaatttaagaagaagcactttactgagaaacatatgaaaacctgaacaaatggagagggatattttgtatttgaatagaaagacttctggtttaaagataattctctttaaattattttttgtagaaatttaaggggtacaagagcagtgttgtcacatggatatattacatagtggtgaagtctggggttttagtgtaaattaatctttacattttgtttgagcccaataaatgtaccaacatgatttttatagaaagatagtcattcctattaatccaaacttgtcccaactttgaattgaattgaggcagagctagcaggtgttccccacggctgaggcatctgaacattaagcatatccctctgagaaccagcctgcattgatactctttctaatgtggacagcatcaagctatgtacgtagttctgtgctcagcaaaagccctgacttctttttgtttatgtcctagccccatacaacaaaatcaaccaaagaattttggttgtggatccagtcacctctgaacatgaactgacatgtcaggctgagggctaccccaaggccgaagtcatctggacaagcagtgaccatcaagtcctgagtggtaagaccaccaccaccaattccaagagagaggagaagcttttcaatgtgaccagcacactgagaatcaacacaacaactaatgagattttctactgcacttttaggagattagatcctgaggaaaaccatacagctgaattggtcatcccaggtaatattctgaatgtgtccattaaaatatgtctaacactgtcccctagcacctagcatgatgtctgcctatcatagtcattcagtgattgttgaataaatgaatgaatgaataaca

SEQ ID NO: 76 - DNA, 2978 bp, Homo sapiens
atctggacaagcagtgaccatcaagtcctgagtggtaagaccaccaccaccaattccaagagagaggagaagcttttcaatgtgaccagcacactgagaatcaacacaacaactaatgagattttctactgcacttttaggagattagatcctgaggaaaaccatacagctgaattggtcatcccaggtaatattctgaatgtgtccattaaaatatgtctaacactgtcccctagcacctagcatgatgtctgcctatcatagtcattcagtgattgttgaataaatgaatgaatgaataacactatgtttacaaaatatatcctaattcctcacctccattcatccaaaccatattgttacttaataaacattcagcagatatttatggaatataccttttgttccatgcattgtagtactcattggatacacatagaataataagactcagttcacactcttcaggaaacagataaaaaactaagaaacaaacaaaaaacaggcaatccaacaccatgtgggaaatgctttcatagccgggaaacctggggaatacctgagaggaatactcaattcaggccttgtttcaggaatccaaatcctggcacatcagagctgcttccctctttccagggtggcaggaaataaatggaacatatttttctatcttatgccaaacatgagggaccctttctccccggtgcctctcccaaggtagtctacaatatttcaactctagcagtctgcttagtgcatagaacatgaggctgtgtgtccctgggcaaattactagacttctgtgtgcttcactttccctgtaggattataatctactgagcaagcttattgtaagggtcagattagcaacagtgtatgaaaatgatttgagaccattgcctgcacaaattcaactatttttttttatctcactactctacagaagtaggtagggtgggagacagagtctgatgagaggctcagaatgtgaaagaaagtgaggcgagtgagcatgatatttaatataaacacaaagatattctgagaagagctgctcactgccccctcccccaatacatgttgataggaaaatgccacgtacttcagcaaaaacaactgaaaaattagatagaaaagtcaatcaataggaaaagataatccaggacggtgttgtgaacagaaagagggggaaaaaactttagaaaatgatggggatgctcttactggggtacgagtcctcaggtattgaactggctttcagtaaaagctagattagtgggttcctgccatttacaagctgttttatgacaacttacttgttgggtggcctacagtaactcacctaactgcactgagtctgtttcctcatctgtaaattggggatttttttttaaatacctggcatgcctaactcataaagttgttctgaaactgaaataaaacatacgtgaacaggcattgtaaactgtaagttacggaaaaagctggctgttgttgtgtctttaaagtttcacctgggtagtcaaagatggatcatgggtctcagtggagagctgagccaggcaggagctgactaagggtgagaggtgggagttagcagcctctgaacatctgtgtaccatgggaccccctttcctcctgcatggtaccccagacaaggagcctagtaagagatactaatggcttgttgtccagagatgttcaaactgcagagaaagataagacaacaagcattggcctccaatcatgatgacagataggaggaggtgggagctccttagcagtgctggttggccttccatgttctactgtgggccatctctgccatgtactgtaggctactagcttctatattaaagaatgcaagaggggccaggagcggaggctcatgcctgtaatctcagcactttgggaggccaaggtgggcagatcacttgaggtcaggagtttgtgaccagcctggccaacatggtgaaactctgcctttactaaaaatataaaaattagctgggtgtggtggtgtgcacctgtaatcccagctactcgggagactgaggcacaagaattgcttgaacctgggaggcggaagttgcagtgagcccagattgcgccactgcactccaccctgggcaacagagaaagactctgcctcaaaaaaaaaaaaaaaaagcaagaggaagtgaaataatcaaggccgccatttaatagtgagcagccactccatgtggtactgtgcaagcacattataaatattagcctcacaagaaatgtattagcatttgtattttgtacactggttaagtatcttgcccaagacctcaaaactggttaagggcagcagaatttagccccagcaccaccttttcaaagcctgggcttctcacacttctccatgctgttcccattttaacacaggtatctcgccattccagccactcaaactttggcatttaagaaaattatcctaaagctaaactaaacttcaaggatgaccattctcctgaccccttcccatcaaaattttatctttagtcagtttgttttcgttttgttttgtttttcagaactacctctggcacatcctccaaatgaaaggactcacttggtaattctgggagccatcttattatgccttggtgtagcactgacattcatcttccgtttaagaaaaggtagtatttccttaattgcagtggtctccactgggggtgaggaaggggtgagaattggatcatggctgcaaggaaacccgacttaacctctgcaaggtggtgcaaaggcattccactgttcaacagcaattatattgaagctgagtgggatcactgggtgaagatgaagcgtaaggggtgaggggcaggagaatgggtatggatggaggtagaagatgcagtgtcatacagtttttttctatcatgaaaataaccacagacttacagaagagaaagagctaaaatgcccgtcattttcagttgcat

SEQ ID NO: 77 - DNA, 122 bp, Homo sapiens
gtgaggacgaggcggcgcccgtctgcatcggctcctgcctcgtggacatctcctacagcgagaccaagaggaggcacgtgttccggctgaccaccgctgacttctgtgaatatctctttcag

SEQ ID NO: 78 - DNA, 82 bp, Homo sapiens
gtaagccccccaaagtctgccaagaacactgaaacccagccaacttctcctcagctagggaccaaaacctttttgtctgtag

SEQ ID NO: 79 - DNA, 229 bp, Homo sapiens
gtgagtgcagtggatggtgcagctgctgggcccctaagcaccacagtgtctgtcaccatcacggtgcgcgatgtcaatgaccatgcacccaccttccccaccagtcctctgcgcctacgtctgccccgcccaggccccagcttcagtaccccaaccctggctctggccacactgagagctgaagatcgtgatgctggtgccaatgcttccattctgtaccggctggcag

SEQ ID NO: 80 - DNA, 94 bp, Homo sapiens
gtaaagagatatcacctgggagtggtcctggggagattcgtaaggtggagcctgtgacacaaaaagactccacctccctgtcttctgagagcag

SEQ ID NO: 81 - DNA, 86 bp, Homo sapiens
gtatttgcagttttgctgtctatagttctatgcacagtaacgctatttcttctacaactaaaattcctcaaacctaaaatcaacag

SEQ ID NO: 82 - DNA, 199 bp, Homo sapiens
gtacggactcaaagaaggtactgcagttccccagcctccacacaaccactaatgtcagttggtgctatttaaactacattaagccaaatcacatccagcatgcagataggaggtcctctgtttacgctggttggtgcataagtttgtacaaccccaaccttccgggggtttccactaaagctgctttgtccctcctgag

SEQ ID NO: 83 - DNA, 73 bp, Homo sapiens
gtatctaaggagactgatccagcacctggtcccctctctgggcagagtgtgaatattgaccttctccccgtag

SEQ ID NO: 84 - DNA, 196 bp, Homo sapiens
gtgagctgcccccacaaagagaactgtgagcccaagaagatgggccccatcaggtcttatctcacttttgtgctccggcctgttcagaggcctgcacagctgctggactatggggacatgatgctgaacaggggctccccctcggggatctggggggactcacctgaggatatcagaaaggacttgacctttctag

SEQ ID NO: 85 - DNA, 724 bp, Homo sapiens
gtaagcgcctacaacaattttttgaactatgtctccagcctcccttcaacaaaagcagggcccaaaattgtgtctcatttgctccatttagtggataacaaagagtcattggagaatatatctgaaaatgatgactacttaaagcaccagccagaaatttcactgcagatgcagttacttaggggattgtggcaaatttgtccacaagcttacttttcaatggtttcagaacatttactggttcttgccctgaaaactgcttatcaaagcaacactgttgctgcgtgttctccatttgttttgcaattccttcaagggagaacactgactttgggtgcgcttaacttacagtactttttcgaccacccagaaagcttgtcattgttgaggagcatccacttcccaatacgaggaaataagacatcacccagagcacatttttcagttctggaaacatgttttgacaaatcacaggtgccaactatagatcaggactatgcttctgcctttgaacctatgaatgaatgggagcgaaatttagctgaaaaagaggataatgtaaagagctatatggatatgcagcgcagggcatcaccagaccttagtactggctattggaaactttctccaaagcagtacaagattccctgtctagaagtcgatgtgaatgatattgatgttgtaggccaggatatgcttgagattctaatgacagttttctcag

SEQ ID NO: 86 - DNA, 88 bp, Homo sapiens
gtacttctccctgtacgaggtggccctggtgacccagggtggctttgactacgcccactcccaacgcgccctctttgatctgcaccag

SEQ ID NO: 87 - DNA, 1298 bp, Homo sapiens
gtgagacacctcttcaaccttcctacagtagtgaagtctttcctctagtcacccctttgttgcttgacaatcagatcctcaacactacccctgctgcttcaagtagtgattcggccttgcatgctacgcctgtatttcccagtgtcgatgtgtcatttgaatccatcctgtcttcctatgatggtgcacctttgcttccattttcctctgcttccttcagtagtgaattgtttcgccatctgcatacagtttctcaaatccttccacaagttacttcagctaccgagagtgataaggtgcccttgcatgcttctctgccagtggctgggggtgatttgctattagagcccagccttgctcagtattctgatgtgctgtccactactcatgctgcttcagagacgctggaatttggtagtgaatctggtgttctttataaaacgcttatgttttctcaagttgaaccacccagcagtgatgccatgatgcatgcacgttcttcagggcctgaaccttcttatgccttgtctgataatgagggctcccaacacatcttcactgtttcttacagttctgcaatacctgtgcatgattctgtgggtgtaacttatcagggttccttatttagcggccctagccatataccaatacctaagtcttcgttaataaccccaactgcatcattactgcagcctactcatgccctctctggtgatggggaatggtctggagcctcttctgatagtgaatttcttttacctgacacagatgggctgacagcccttaacatttcttcacctgtttctgtagctgaatttacatatacaacatctgtgtttggtgatgataataaggcgctttctaaaagtgaaataatatatggaaatgagactgaactgcaaattccttctttcaatgagatggtttacccttctgaaagcacagtcatgcccaacatgtatgataatgtaaataagttgaatgcgtctttacaagaaacctctgtttccatttctagcaccaagggcatgtttccagggtcccttgctcataccaccactaaggtttttgatcatgagattagtcaagttccagaaaataacttttcagttcaacctacacatactgtctctcaagcatctggtgacacttcgcttaaacctgtgcttagtgcaaactcagagccagcatcctctgaccctgcttctagtgaaatgttatctccttcaactcagctcttattttatgagacctcagcttcttttagtactgaagtattgctacaaccttcctttcag

SEQ ID NO: 88 - DNA, 958 bp, Homo sapiens
gtagcacaggagctgcctactacattagtgggggagacttctgtaacagtaggagtggatcccttgatggccccagaatcccatatattagcttctaacaccatggagacccatatattagcatccaacaccatggactcccaaatgctagcgtccaacaccatggactcccagatgctagcatccaacaccatggactcccagatgttagcgtctagcaccatggactcccagatgttagcaactagctccatggactcccagatgttagcaactagctccatggactcccagatgttagcaactagcactatggactcccagatgttagcaaccagttccatggactcccagatgttagcaaccagctccatggactcccagatgttagcaaccagctccatggactcccagatgttagcaaccagctccatggactcccagatgttagcaaccagcaccatggattctcagatgttagcaaccagcaccatggactcccagatgttagcaactagctcaatggattcccagatgttagcatctggcactatggactctcaaatgttagcttctggcaccatggatgctcagatgttagcgtctggtaccatggatgcccagatgttagcgtctagtacccaagattctgctatgttgggttcaaaatctcctgatccctataggttagctcaggatccttacaggttagctcaggatccctataggttgggccatgacccctatagattaggtcatgatgcttacaggttaggacaagacccttatagattaggccatgatccctacagactaactcctgatccctataggatgtcacctagaccctacaggatagcacccaggtcctatagaatagcacccaggccatataggttagcacctagacccctgatgttagcatctagacgttctatgatgatgtcctatgctgcag

SEQ ID NO: 89 - DNA, 1270 bp, Homo sapiens
gtagcacaggagctgcctactacattagtgggggagacttctgtaacagtaggagtggatcccttgatggccccagaatcccatatattagcttctaacaccatggagacccatatattagcatccaacaccatggactcccaaatgctagcgtccaacaccatggactcccagatgctagcatccaacaccatggactcccagatgttagcgtctagcaccatggactcccagatgttagcaactagctccatggactcccagatgttagcaactagctccatggactcccagatgttagcaactagcactatggactcccagatgttagcaaccagttccatggactcccagatgttagcaaccagctccatggactcccagatgttagcaaccagctccatggactcccagatgttagcaaccagctccatggactcccagatgttagcaaccagcaccatggattctcagatgttagcaaccagcaccatggactcccagatgttagcaactagctcaatggattcccagatgttagcatctggcactatggactctcaaatgttagcttctggcaccatggatgctcagatgttagcgtctggtaccatggatgcccagatgttagcgtctagtacccaagattctgctatgttgggttcaaaatctcctgatccctataggttagctcaggatccttacaggttagctcaggatccctataggttgggccatgacccctatagattaggtcatgatgcttacaggttaggacaagacccttatagattaggccatgatccctacagactaactcctgatccctataggatgtcacctagaccctacaggatagcacccaggtcctatagaatagcacccaggccatataggttagcacctagacccctgatgttagcatctagacgttctatgatgatgtcctatgctgcagaacgttccatgatgtcatcttacgaacgctctatgatgtcttatgagcggtctatgatgtcccctatggctgaacgctctatgatgtcagcctacgagcgctctatgatgtcagcctacgagcgctctatgatgtcccctatggctgagcgctctatgatgtcagcttatgaacgctccatgatgtcagcttatgaacgctccatgatgtccccaatggctgatcgatctatgatgtccatgggtgctgaccggtctatgatgtcgtcatactctgctgctgaccggtctatgatgtcatcgtactctgcag

SEQ ID NO: 90 - DNA, 386 bp, Homo sapiens
gtatcagccaggcccaggcaactgttcctcctgcagttcctacccacaccccaggccctgccccgagcccaagccctgccttgacacacagtaccgcgcagagtgacagcacctcttacatcagtgctgtggggaacacgaacgctaatgggacagtagtgccaccgcagcagatgggctcaggtccttgtggttcttgtgggcgaaggtgcagctgtgggaccaatggaaaccttcagctaaatagttactattatcctaatccaatgcctggaccaatgtaccgagtcccttcattctttactctgccatccatttgcaatggcagctacctcaaccaagcacatcagagcaatggaaaccaacttcctttttttctgcctcag

SEQ ID NO: 91 - DNA, 318 bp, Homo sapiens
aaagcgggcagcggcctgcgccagtggaagcgggtgtacgccgcgctgcgggcgcgctcgctctcgctgagcaaggagcggcgggagcccgggccggcggcggcgggggctgcggcggccggcgcaggtgaggacgaggcggcgcccgtctgcatcggctcctgcctcgtggacatctcctacagcgagaccaagaggaggcacgtgttccggctgaccaccgctgacttctgtgaatatctctttcaggctgaggaccgggatgacatgctgggctggatcagagcgatccgggagaacagcagggccgagggcgag

SEQ ID NO: 92 - DNA, 498 bp, Homo sapiens
gagataaatctccccctaaacttgaaccatcagatgcattacctcttccttcaaactcggagactaattcagaaccaccaaccctcaaaccagtagaactcaacccagagcagagtaaacttttcaaaagagtcacatttgataatgaatcacatagcgcttgcactcagagcgcactggtaagcggacgccctccagagcccacccgcgccagtagtggcgatgtgccggcggcggcggcctccgcggtggcggagccagcaagcgatgtaaacagacgcacttctgttctcttctgcaaatcgaaaagtgtaagccccccaaagtctgccaagaacactgaaacccagccaacttctcctcagctagggaccaaaacctttttgtctgtagtccttccgaggttggagactcttctgcagccaaggaaaaggtcgcggagcacatgcggagactccgaggtggaggaggagtccccaggaaagcgcctggacgcag

SEQ ID NO: 93 - DNA, 879 bp, Homo sapiens
atggggacccatcaggagcctttgtcctagaccttgcttctggagagtttggcaccatgcggccactagacagagaagtggagccagctttccagctgaggatagaggcccgggatggaggccagccagctctcagtgccacgctgcttttgacagtgacagtgctggatgccaatgaccatgctccagcctttcctgtgcctgcctactcggtggaggtgccggaggatgtgcctgcagggaccctgctgctgcagctacaggctcatgaccctgatgctggagctaatggccatgtgacctactacctgggcgccggtacagcaggagccttcctgctggagcccagctctggagaactgcgcacagctgcagccttggacagagaacagtgtcccagctacaccttttctgtgagtgcagtggatggtgcagctgctgggcccctaagcaccacagtgtctgtcaccatcacggtgcgcgatgtcaatgaccatgcacccaccttccccaccagtcctctgcgcctacgtctgccccgcccaggccccagcttcagtaccccaaccctggctctggccacactgagagctgaagatcgtgatgctggtgccaatgcttccattctgtaccggctggcaggcacaccacctcctggcactactgtggactcttacactggtgaaatccgcgtggcccgctctcctgtagctctaggcccccgagatcgtgtcctcttcattgtggccactgatcttggccgtccagctcgctctgccactggtgtgatcattgttggactgcagggggaagctgagcgtggaccccgctttccccgggctagcagtgaggctacgattcgtgagaatgcgcccccag

SEQ ID NO: 94 - DNA, 564 bp, Homo sapiens
agttcacatgagactctgaatatagtggaggagaagaagcgggcagaggttgggaaagacgaaagagtaatcacagaagaaatgaatggtaaagagatatcacctgggagtggtcctggggagattcgtaaggtggagcctgtgacacaaaaagactccacctccctgtcttctgagagcagcagcagcagcagtgagagtgaggaggaagacgtgggagagtaccgtccccaccaccgagtgaccgagggcaccatcagggaggaacaggagtatgaagaagaggtggaggaagaaccccgcccggcagccaaggtagtagagagggaggaagcagtgcccgaagccagcccagtcacacaagcaggtgccagtgtaatcacagtagaaacagtgatccaggaaaatgtaggtgcccaaaagatacccggagagaagagtgtacacgaaggcgctcttaagcaagacatgggagaagaagcagaggaagagccacagaaagttaacggagaggtgtcccatgttgacattgatgttttgccacaaattatttgttgttcagag

SEQ ID NO: 95 - DNA, 228 bp, Homo sapiens
gacttccctctagaatcctccaacatggagcctcttgcagcttacccgctaaaatgttccgggcccagagcaaaggtatttgcagttttgctgtctatagttctatgcacagtaacgctatttcttctacaactaaaattcctcaaacctaaaatcaacagcttttatgcctttgaagtgaaggatgcaaaaggaagaactgtttctctggaaaagtataaaggcaaa

SEQ ID NO: 96 - DNA, 5582 bp, Homo sapiens
aagaagagcgtgatttctcctccaaggccgttgatctccaacccagaactaaaggggagaagagccacccccagcatccagcgtggcatctcttgtgccaggaccagggatgactgggccatggacacagatgtctccaaccttcaaccgtttgcatagcacacgggggactcgtgggggccacctgccactgccagctgaaacaatacaatggcaatactgacatccttcatgacgttttcccgacagacattcaggcagaaagtgctggtgcgttttctgtctgcaaagtagagggccatgcctcaccaatagaatagcgtgggccctgatgacctgctccgagtccactcacagccagtgacacttgcaaaaaactcccaaagccgtcttgggtttggctcccacagctcttgaccaatgtggccaaagctggacacctccttgggacactgggattattcataaatgcagcccgccctgactctccctgaatagcatctgaagtctttgtgaaggtcatggatcctgaacaaagtgtcaagggcaccaagaaggctgagggaagtccccggaagcggctgaccaaaggagaggccattcagaccagtgtttcttccagcgtcccatacccaggcagcggcacagctgccacccaagagagccccgcccaagagctcttagccccgcagcccttcccgggcccctcatcagttcttagggaaggctctcaggagaaaacgggccagcagcagaagccccccaaaaggccccccatcgaagcatccgtccacatctcacagcttccgcagcaccctctgacaccagcattcatgtcgcctggcaaacctgagcatctcctggaggggtccacatggcaactggttgaccccatgagacctggaccctctggctccttcgtggcccctgggctccatcctcagagccagctccttccttcccacgcttccatcattccccccgaggaccttcctggagtccccaaagtcttcgtgcctcgtccttcccaggtctccttgaagcccacagaagaggcacacaagaaggagaggaagccccagaagccaggcaagtacatctgccagtactgcagccggccctgtgccaagcccagcgtgctccagaagcacattcgctcacacacaggtgagaggccctacccctgcggcccctgtggcttctccttcaagaccaagagtaatctctacaagcacaggaagtcccatgcccaccgcatcaaagcaggcctggcctcaggcatgggtggcgagatgtacccacatgggctggagatggagcggatccctggggaagagtttgaggagcccactgagggagaaagcacagattctgaagaggagactagtgccacctctggtcaccctgcagagctctccccaagacccaagcagccccttctctccagcgggctatacagctctgggagccacagttccagccacgaacgctgttccctgtcccagtccagcacagcccagtcactcgaagacccccctccatttgtggaaccctcatctgagcaccccctgagccataaacctgaagacacccacacgattaagcagaagctggccctccgcttaagcgagaggaagaaggtgatcgatgagcaggcgtttctgagcccaggcagcaaagggagtactgagtctgggtatttctctcgctccgagagtgcagagcagcaggtcagccccccaaacaccaacgccaagtcctacgctgagatcatctttggcaagtgtgggcgaataggacagcggaccgccatgctgacagccacctccacccagcccctcctgcccctgtccaccgaagacaagcccagcctggtgcctttgtctgtaccccggacgcaggtgatcgagcacatcacgaagctcatcaccatcaacgaggccgtggtggacaccagcgagatcgacagcgtgaagccaaggcggagctcactgtccaggcgcagcagcatggagtccccaaaatccagcctctaccgggagcccctgtcatcccacagtgagaaaaccaagcctgaacaatcactgctgagcctccagcacccgcccagtaccgccccccctgtgcctctcctgagaagccactcaatgccttctgccgcctgcactatcagcaccccccaccaccccttccgaggtagctactccttcgatgaccatatcaccgactccgaagccctgagccacagcagtcacgtgtttacctcccacccccggatgctgaagcgccagccggcaatcgaattacctttgggaggggaatacagttctgaggagcctggcccaagcagcaaagacacagcctccaagccctcggacgaagtggaacccaaggaaagcgagcttaccaaaaagaccaagaagggtttgaaaacaaaaggggtgatctacgaatgtaacatatgtggtgctcggtacaagaaaagggataactacgaagcccacaaaaaatactactgctcagagcttcagatcgcaaagcccatctctgcaggcacccacacatctccagaagctgaaaagagtcagattgagcatgagccgtggtcccaaatgatgcattacaaactgggaaccaccctggaactcactccactgaggaagaggaggaaagagaagagccttggggacgaggaagagccacctgcctttgagtccacaaaaagtcagtttggcagccccgggccatctgatgctgctcggaaccttcccctggagtccaccaagtcaccagcagaaccaagtaaatcagtgccctccttggagggacccacgggcttccagccaaggactcccaagccagggtccggttcagaatcagggaaggagaggagaacaacgtccaaagaaatttctgtcatccagcacaccagctcctttgagaaatctgattctctcgagcagccgagtggcttggaaggggaagacaaacctctggcccagttcccatcacccccacctgccccacacggacgctctgctcactccctgcagcctaagttggtccgccagcccaacattcaggttcctgagatcctagtaactgaggagcctgaccggccggacacagagccagagccgccccctaaggaacctgagaagactgaggagttccaatggccccagcgcagccagacacttgcccagctcccagctgagaagctgccacccaaaaagaagaggttgcgcctggcagagatggcccaatcatcaggggagtccagcttcgagtcctctgtgcctctgtctcgcagcccgagccaggaaagcaatgtctctttgagtgggtccagccgctcagcctcgtttgagagggatgaccatgggaaagccgaggcccccagtccctcatctgacatgcgccccaaacccctgggcacccacatgttgactgtccccagccaccacccacatgcccgagagatgcggaggtcagcctcagagcagagccccaacgtttcccattctgcccacatgaccgagacacgcagcaaatcctttgactatggcagcttgtccttgacaggcccttctgctccagccccagtggctccaccagcgcgggtggccccgccagagagaagaaaatgcttcttggtgagacaggcctctctgagcaggcctccagaatctgagttggaggttgcccccaagggaagacaggagagcgaagaaccacagccctcatccagtaaaccctctgccaaaagctcattgtcccagatttcctctgcggccacctcacatggtggacccccgggaggcaagggcccagggcaggacaggcccccattggggcccactgtgccctacacagaagcactgcaagtgttccaccaccccgttgcccagacacccctgcatgagaagccatacctgcccccaccagtctcccttttctccttccagcatctcgtgcagcatgagccaggacagtctccagaattcttctccacccaggccatgtccagcctcctgtcctcaccatactccatgcccccacttcctccctccttatttcaagccccaccgcttcctctccagcctactgttctgcacccaggccaactccatctcccccagctcatgcctcacccagccaacatccccttcaggcagcccccttccttcctccccatgccatacccgacctcctcagcactgtcttctgggtttttcctgcctctgcaatcccagtttgcacttcagctccctggtgatgtggaaagccatctgccccagatcaaaaccagcctggccccactggcaacaggaagtgctggcctctcccccagcacagagtacagcagtgacatccggctaccccctgtggctcccccagccagctcctcagcacctacatcagctcctccactggccctgcctgcctgtccagacaccatggtgtccctggttgtgcctgtccgtgttcagaccaatatgccgtcctatgggagcgcaatgtacaccaccctttcccagatcttggtcacccagtcccaaggcagctcagcaactgtggcacttcccaagtttgaggaacccccatcaaaggggacgactgtatgtggtgcagatgtgcatgaggttgggcccggcccttctgggttaagtgaagagcaaagcagagctttcccaactccatacctgagagtgcctgtgacattacctgaaagaaaaggcacttccctgtcatcagagagtatcttgagcctggaggggagttcatcaacagcagggggaagcaaacgtgtcctttcaccagctggcagccttgaacttaccatggaaacccagcagcaaaaaagagtgaaggaggaggaggcttccaaggcagatgaaaaacttgagctggtaaaaccatgcagtgtggtccttaccagcaccgaggatgggaagaggccagagaaatcccacttaggcaaccagggccaaggcaggagggagctagaaatgctgtccagcctgtcctcagatccatctgacacaaaggaaattcctcccctccctcaccctgcattgtcccatgggacagccccaggctcagaagctttgaaggaatatccccagccatctggcaaacctcaccgaagagggttgaccccactgagcgtgaagaaagaagattccaaggaacaacctgatctcccctccttggcacctccgagctctctgcctctgtcagaaacgtcctccagaccagccaagtcacaagaaggtacggactcaaagaaggtactgcagttccccagcctccacacaaccactaatgtcagttggtgctatttaaactacattaagccaaatcacatccagcatgcagataggaggtcctctgtttacgctggttggtgcataagtttgtacaaccccaaccttccgggggtttccactaaagctgctttgtccctcctgaggtctaagcagaaagtgagcaaagagacatacaccatggccacagctccgcatcctgaggcaggaaggcttgtgccatccagctcccgcaagccccgcatgacagag

SEQ ID NO: 97 - DNA, 718 bp, Homo sapiens
aaacagccagagaacattctaaaggccaatctgcttgtgtccacttcagacccaatgaaggcagtgatggaagcaggcatccaggagttccctctgttgagaagtccagaggtgagacagctggcgatgagcggtgtgcaaaggggaaaggcttcgtgaagcagccctcctgtatcagggtggctgggcctgatgagaaaggagaggactccaggcgggcagctgcaagccttccaccgcacgatagccactggaagcccagcaggcggcatgacacagaacccaaggccaaatgtgccccccagaaaaggcgcactcaagagctcagaggaggaaggtgctctccggctggttctagccgccctggcagtgcccggggggaggcggtccatgctgggcagaatcctccccaccatcgtacaccaagaaacaaagtgacacaagccaagctcacaggagggctctattcacatttgccacagagcacagaggagttgaggtcaggagctaggaggctggagacatctaccctgtccgaggactttcaggtatctaaggagactgatccagcacctggtcccctctctgggcagagtgtgaatattgaccttctccccgtagagctccgactgcagataattcagagagaacgaaggaggaaggagctgtttcgcaaaaagaacaaggcagcagcagtcatccagcgcgcctggcgaag

SEQ ID NO: 98 - DNA, 746 bp, Homo sapiens
gttgtgcccgtaagcagtgcagcgaggggaggacatattccaatgcagtcatttcacctaacttggaaaccaccagaatcatgcgggtgtctcacaccttccctgtcgtagactgcacggccgcttgctgtgacctgtccagctgtgacctggcctggtggttcgagggccgctgctacctggtgagctgcccccacaaagagaactgtgagcccaagaagatgggccccatcaggtcttatctcacttttgtgctccggcctgttcagaggcctgcacagctgctggactatggggacatgatgctgaacaggggctccccctcggggatctggggggactcacctgaggatatcagaaaggacttgacctttctaggcaaagattggggcctagaggagatgtctgagtactcagatgactaccgggagctggagaaggacctcttgcaacccagtggcaagcaggagcccagagggagtgccgagtacacggactggggcctactgccgggcagcgagggggccttcaactcctctgttggagacagtcctgcggtgccagcggagacgcagcaggaccctgagctccattacctgaatgagtcggcttcaacccctgccccaaaactccctgagagaagtgtgttgcttcccttgccgactactccatcttcaggagaggtgttggagaaagaaaaggcttctcagctccaggaacaatccagcaacagctctggaaaagag

SEQ ID NO: 99 - DNA, 2112 bp, Homo sapiens
aaatggcacagggtgaagcccagtggtttcaagaggcaaagaatctgaatgagcagctgagagcagcttataccagcgccagtttccgccacatgtctttgcttgatatctcttccgatctggccacggaccacttgctgggctgtgatctgtctattgcttcaaaacacatcagcaaacctgtgcaagaacctctggtgctgcctgaggtctttggcaacttgaactctgtcatgtgtgtggagggtgaagctggaagtggaaagacggtcctcctgaagaaaatagcttttctgtgggcatctggatgctgtcccctgttaaacaggttccagctggttttctacctctcccttagttccaccagaccagacgaggggctggccagtatcatctgtgaccagctcctagagaaagaaggatctgttactgaaatgtgcgtgaggaacattatccagcagttaaagaatcaggtcttattccttttagatgactacaaagaaatatgttcaatccctcaagtcataggaaaactgattcaaaaaaaccacttatcccggacctgcctattgattgctgtccgtacaaacagggccagggacatccgccgatacctagagaccattctagagatcaaagcatttcccttttataatactgtctgtatattacggaagctcttttcacataatatgactcgtctgcgaaagtttatggtttactttggaaagaaccaaagtttgcagaagatacagaaaactcctctctttgtggcggcgatctgtgctcattggtttcagtatccttttgacccatcctttgatgatgtggctgttttcaagtcctatatggaacgcctttccttaaggaacaaagcgacagctgaaattctcaaagcaactgtgtcctcctgtggtgagctggccttgaaagggtttttttcatgttgctttgagtttaatgatgatgatctcgcagaagcaggggttgatgaagatgaagatctaaccatgtgcttgatgagcaaatttacagcccagagactaagaccattctaccggtttttaagtcctgccttccaagaatttcttgcggggatgaggctgattgaactcctggattcagataggcaggaacatcaagatttgggactgtatcatttgaaacaaatcaactcacccatgatgactgtaagcgcctacaacaattttttgaactatgtctccagcctcccttcaacaaaagcagggcccaaaattgtgtctcatttgctccatttagtggataacaaagagtcattggagaatatatctgaaaatgatgactacttaaagcaccagccagaaatttcactgcagatgcagttacttaggggattgtggcaaatttgtccacaagcttacttttcaatggtttcagaacatttactggttcttgccctgaaaactgcttatcaaagcaacactgttgctgcgtgttctccatttgttttgcaattccttcaagggagaacactgactttgggtgcgcttaacttacagtactttttcgaccacccagaaagcttgtcattgttgaggagcatccacttcccaatacgaggaaataagacatcacccagagcacatttttcagttctggaaacatgttttgacaaatcacaggtgccaactatagatcaggactatgcttctgcctttgaacctatgaatgaatgggagcgaaatttagctgaaaaagaggataatgtaaagagctatatggatatgcagcgcagggcatcaccagaccttagtactggctattggaaactttctccaaagcagtacaagattccctgtctagaagtcgatgtgaatgatattgatgttgtaggccaggatatgcttgagattctaatgacagttttctcagcttcacagcgcatcgaactccatttaaaccacagcagaggctttatagaaagcatccgcccagctcttgagctgtctaaggcctctgtcaccaagtgctccataagcaagttggaactcagcgcagccgaacaggaactgcttctcaccctgccttccctggaatctcttgaagtctcagggacaatccagtcacaag

SEQ ID NO: 100 - DNA, 313 bp, Homo sapiens
gccatcgtgctggtgctctttggtgctcttctgggcctgagcctctacggagccaccttggtgcaagacggcctggccctgacggatgtggtgcctcggggcaccaaggagcatgccttcctgagcgcccagctcaggtacttctccctgtacgaggtggccctggtgacccagggtggctttgactacgcccactcccaacgcgccctctttgatctgcaccagcgcttcagttccctcaaggcggtgctgcccccaccggccacccaggcaccccgcacctggctgcactattaccgcaactggctacagg

SEQ ID NO: 101 - DNA, 3556 bp, Homo sapiens
gaggaggaagagggaaaagacattgaagaaggcgctattgtgaatcctggtagagacagtgctacaaaccaaatcaggaaaaaggaaccccagatttctaccacaacacactacaatcgcatagggacgaaatacaatgaagccaagactaaccgatccccaacaagaggaagtgaattctctggaaagggtgatgttcccaatacatctttaaattccacttcccaaccagtcactaaattagccacagaaaaagatatttccttgacttctcagactgtgactgaactgccacctcacactgtggaaggtacttcagcctctttaaatgatggctctaaaactgttcttagatctccacatatgaacttgtcggggactgcagaatccttaaatacagtttctataacagaatatgaggaggagagtttattgaccagtttcaagcttgatactggagctgaagattcttcaggctccagtcccgcaacttctgctatcccattcatctctgagaacatatcccaagggtatatattttcctccgaaaacccagagacaataacatatgatgtccttataccagaatctgctagaaatgcttccgaagattcaacttcatcaggttcagaagaatcactaaaggatccttctatggagggaaatgtgtggtttcctagctctacagacataacagcacagcccgatgttggatcaggcagagagagctttctccagactaattacactgagatacgtgttgatgaatctgagaagacaaccaagtccttttctgcaggcccagtgatgtcacagggtccctcagttacagatctggaaatgccacattattctacctttgcctacttcccaactgaggtaacacctcatgcttttaccccatcctccagacaacaggatttggtctccacggtcaacgtggtatactcgcagacaacccaaccggtatacaatggtgagacacctcttcaaccttcctacagtagtgaagtctttcctctagtcacccctttgttgcttgacaatcagatcctcaacactacccctgctgcttcaagtagtgattcggccttgcatgctacgcctgtatttcccagtgtcgatgtgtcatttgaatccatcctgtcttcctatgatggtgcacctttgcttccattttcctctgcttccttcagtagtgaattgtttcgccatctgcatacagtttctcaaatccttccacaagttacttcagctaccgagagtgataaggtgcccttgcatgcttctctgccagtggctgggggtgatttgctattagagcccagccttgctcagtattctgatgtgctgtccactactcatgctgcttcagagacgctggaatttggtagtgaatctggtgttctttataaaacgcttatgttttctcaagttgaaccacccagcagtgatgccatgatgcatgcacgttcttcagggcctgaaccttcttatgccttgtctgataatgagggctcccaacacatcttcactgtttcttacagttctgcaatacctgtgcatgattctgtgggtgtaacttatcagggttccttatttagcggccctagccatataccaatacctaagtcttcgttaataaccccaactgcatcattactgcagcctactcatgccctctctggtgatggggaatggtctggagcctcttctgatagtgaatttcttttacctgacacagatgggctgacagcccttaacatttcttcacctgtttctgtagctgaatttacatatacaacatctgtgtttggtgatgataataaggcgctttctaaaagtgaaataatatatggaaatgagactgaactgcaaattccttctttcaatgagatggtttacccttctgaaagcacagtcatgcccaacatgtatgataatgtaaataagttgaatgcgtctttacaagaaacctctgtttccatttctagcaccaagggcatgtttccagggtcccttgctcataccaccactaaggtttttgatcatgagattagtcaagttccagaaaataacttttcagttcaacctacacatactgtctctcaagcatctggtgacacttcgcttaaacctgtgcttagtgcaaactcagagccagcatcctctgaccctgcttctagtgaaatgttatctccttcaactcagctcttattttatgagacctcagcttcttttagtactgaagtattgctacaaccttcctttcaggcttctgatgttgacaccttgcttaaaactgttcttccagctgtgcccagtgatccaatattggttgaaacccccaaagttgataaaattagttctacaatgttgcatctcattgtatcaaattctgcttcaagtgaaaacatgctgcactctacatctgtaccagtttttgatgtgtcgcctacttctcatatgcactctgcttcacttcaaggtttgaccatttcctatgcaagtgagaaatatgaaccagttttgttaaaaagtgaaagttcccaccaagtggtaccttctttgtacagtaatgatgagttgttccaaacggccaatttggagattaaccaggcccatcccccaaaaggaaggcatgtatttgctacacctgttttatcaattgatgaaccattaaatacactaataaataagcttatacattccgatgaaattttaacctccaccaaaagttctgttactggtaaggtatttgctggtattccaacagttgcttctgatacatttgtatctactgatcattctgttcctataggaaatgggcatgttgccattacagctgtttctccccacagagatggttctgtaacctcaacaaagttgctgtttccttctaaggcaacttctgagctgagtcatagtgccaaatctgatgccggtttagtgggtggtggtgaagatggtgacactgatgatgatggtgatgatgatgatgatgacagaggtagtgatggcttatccattcataagtgtatgtcatgctcatcctatagagaatcacaggaaaaggtaatgaatgattcagacacccacgaaaacagtcttatggatcagaataatccaatctcatactcactatctgagaattctgaagaagataatagagtcacaagtgtatcctcagacagtcaaactggtatggacagaagtcctggtaaatcaccatcagcaaatgggctatcccaaaagcacaatgatggaaaagaggaaaatgacattcagactggtagtgctctgcttcctctcagccctgaatctaaagcatgggcagttctgacaagtgatgaagaaagtggatcagggcaaggtacctcagatagccttaatgagaatgagacttccacagatttcagttttgcagacactaatgaaaaagatgctgatgggatcctggcagcaggtgactcagaaataactcctggattcccacagtccccaacatcatctgttactagcgagaactcagaagtgttccacgtttcagaggcag

SEQ ID NO: 102 - DNA, 5916 bp, Homo sapiens
acttgaaagagggctccagaaaaagtagatgcgtatctgtacaaacagatcctactgatgaaattcccactaaaaagtcaaagaagcataaaaagcacaaaaacaaaaagaagaaaaagaagaaagaaaaggaaaaaaaatataaaagacagccagaagaatctgagtcaaagacgaaatctcatgatgatgggaacatagatttagaatctgattcctttttaaagtttgattctgaaccttcagctgtggcgctggagcttcctacaagagcatttggcccatctgagaccaatgaatcccctgcagttgtgctagaacctcctgtagtatcaatggaggtatcagagccacacatcttagaaactctgaagccagctacaaaaactgcagaactgtcagttgtatctacatcagtaatctcagagcagtcagagcagtctgtggcagtaatgccagaaccatccatgacaaagattctggattcctttgcagcagcaccagtgcctactacaacactggtgttgaagtcatctgagccagttgtaacaatgtcagtggagtatcagatgaagtctgtgctgaaatctgtggagagcacatctccagagccatcaaagatcatgttggtagagcccccagtagcaaaagtgttagagccttcagaaacccttgtggtatcatcagagacacctactgaggtgtaccctgagccaagcacatcaacaacaatggattttccagagtcatctgcaattgaagcgctaagattgccagagcagcctgtagacgtaccatcggagattgcagattcatccatgacaagaccgcaggagttgccggagctgcctaagaccacagcgttggagctgcaggagtcgtcggtggcctcagcgatggagttgccggggccacctgcgacctccatgccggagttgcaggggccccctgtgactccagtgctggagttacctgggccctctgctaccccggtgccagagttgccagggcccctttctaccccagtgcctgagttgccagggccccctgcgacagcagtgcctgagttgccagggccctctgtgacaccagtgccacagttgtcgcaggaattgccagggcttccagcaccatccatggggttggagccaccacaggaggtaccagagccacctgtgatggcacaggagttgccagggctgcctttggtgacagcagcagtagagttgccagagcagcctgcggtaacagtagcaatggagttgaccgaacaacctgtgacgacgacagagttggagcagcctgtggggatgacaacggtggaacatcctgggcatcctgaggtgacaacggcaacagggttgctggggcagcctgaggcaacgatggtgctggagttgccaggacagccagtggcaacgacagcgctggagttgccggggcagccttcggtgactggggtgccagagttgccagggctgccttcggcaactagggcactggagttgtcggggcagcctgtggcaactggggcactagagttgcctgggccgctcatggcagctggggcactggagttctcggggcagtctggggcagctggagcactggagcttttggggcagcctctggcaacaggggtgctggagttgccagggcagcctggggcgccagagttgcctgggcagcctgtggcaactgtggcgctggagatctctgttcagtctgtggtgacaacatcggagctgtcaacgatgaccgtgtcgcagtccctggaggtgccctcgacgacagcgctggaatcctataatacggtagcacaggagctgcctactacattagtgggggagacttctgtaacagtaggagtggatcccttgatggccccagaatcccatatattagcttctaacaccatggagacccatatattagcatccaacaccatggactcccaaatgctagcgtccaacaccatggactcccagatgctagcatccaacaccatggactcccagatgttagcgtctagcaccatggactcccagatgttagcaactagctccatggactcccagatgttagcaactagctccatggactcccagatgttagcaactagcactatggactcccagatgttagcaaccagttccatggactcccagatgttagcaaccagctccatggactcccagatgttagcaaccagctccatggactcccagatgttagcaaccagctccatggactcccagatgttagcaaccagcaccatggattctcagatgttagcaaccagcaccatggactcccagatgttagcaactagctcaatggattcccagatgttagcatctggcactatggactctcaaatgttagcttctggcaccatggatgctcagatgttagcgtctggtaccatggatgcccagatgttagcgtctagtacccaagattctgctatgttgggttcaaaatctcctgatccctataggttagctcaggatccttacaggttagctcaggatccctataggttgggccatgacccctatagattaggtcatgatgcttacaggttaggacaagacccttatagattaggccatgatccctacagactaactcctgatccctataggatgtcacctagaccctacaggatagcacccaggtcctatagaatagcacccaggccatataggttagcacctagacccctgatgttagcatctagacgttctatgatgatgtcctatgctgcagaacgttccatgatgtcatcttacgaacgctctatgatgtcttatgagcggtctatgatgtcccctatggctgaacgctctatgatgtcagcctacgagcgctctatgatgtcagcctacgagcgctctatgatgtcccctatggctgagcgctctatgatgtcagcttatgaacgctccatgatgtcagcttatgaacgctccatgatgtccccaatggctgatcgatctatgatgtccatgggtgctgaccggtctatgatgtcgtcatactctgctgctgaccggtctatgatgtcatcgtactctgcagctgaccgatctatgatgtcatcttatactgctgatcgttcaatgatgtctatggctgctgattcttacaccgattcttacactgacacatatacagaggcatatatggtgccacctttgcctcctgaagagcccccaacaatgccaccgttgccacctgaggagccaccaatgacaccaccattgcctcctgaggaaccaccagagggtccagcattgcccactgagcagtcagcattaacagctgaaaatacttggcctacagaggtgccatcatcaccatctgaagagtctgtatcgcagcctgagcctcctgtgagtcaaagtgagatttcggagccttcagcagtgcctactgattattcagtgtcagcatcagatccctcagttttagtatcagaggctgctgtgactgttccagaaccaccaccagagccagaatcttcaattacgttaacacctgtagagtctgcagtagtagcagaagaacatgaagttgttccagagagaccagtgacttgtatggtatctgaaactcccgccatgtcagctgaaccaactgtgttagcatcagagcctcctgttatgtcagagacagcagaaacatttgattccatgagagcctcaggacatgttgcctcagaagtatctacatccttgttggttccagcagtaactactccagtgctggcagagagcattctggagccgccagccatggctgccccagagtcttcagctatggctgtcctggagtcttcggctgtgaccgtcctggagtcttcgactgtgactgtcctggagtcttcgactgtaactgtcctggagccttcggttgtgactgtcccggagcctcctgttgtggctgagccagactatgttaccattcctgtgccagttgtttctgcgctggagccttctgtgcctgttctggaaccagcggtgtcagtccttcaaccttctatgattgtttcagaaccatctgtttctgtccaggaatcgactgtgacagtttcagagcctgctgtcacagtctcagagcagactcaagtaataccaactgaggtggctatagagtccacaccaatgatactggaatctagtatcatgtcatcacatgttatgaaaggaattaatctatcctctggtgatcaaaatcttgctccagagattggcatgcaggagattgcattgcattcaggtgaagaaccacatgctgaggaacacctgaaaggtgacttttacgaaagtgaacatggtataaatatagaccttaatataaataatcatttaattgctaaagagatggaacataatacagtgtgtgctgctggtactagtcctgttggggaaattggtgaagagaaaattttgcccaccagtgagactaaacagcgcacagtattggatacctaccctggtgttagtgaagctgatgcaggagaaactctatcttctactggtccttttgctctggaacctgatgcaacaggaactagtaagggtattgaatttaccacagcatctactctcagtttagttaataaatatgatgttgatttatctttaactactcaagatactgaacatgacatggtaatttccaccagtcctagtggtggtagtgaagctgacattgaagggcctttgcctgctaaagatattcatcttgatttaccatctaataataaccttgttagtaaggatacagaagaaccattacctgtaaaagagagtgaccagacattagcagctctgctcagccctaaagaaagtagtggaggagaaaaagaagtacctccccctcctaaagagacactgcctgattcaggattttctgccaatattgaggatattaatgaagcagatttagtgagaccgttacttcctaaggacatggaacgtcttacaagccttagagctggcattgaaggacctttacttgcaagtgatgttggacgtgacagatctgctgccagcccggttgtaagtagtatgccagaaagagcttcagagtcttcttcagaggaaaaagatgattatgaaatttttgtaaaagttaaggacactcacgaaaaaagcaagaaaaataagaaccgtgataagggggagaaagagaagaaaagagactcttcattaagatctcgaagtaagcgttccaaatcttctgaacacaaatcacgcaagcgtaccagtgaatctcgttctagggcaagaaagagatcatctaagtccaagtctcatcgctctcagacacgttcacggtcacgttcaagacgcaggaggagaagcagcagatcaagatcaaagtctagaggaagaagatctgtatcaaaagagaagcgcaaaagatctccaaagcacagatccaagtctagggaaagaaaaagaaaaagatcaagctccagggataaccgaaagacagttagagctcgaagtcgaaccccaagtcgtcggagtcggagtcatactccaagtcgtcgacgaaggtctagatctgtgggtagaagaaggagctttagcatttccccaagccgccgcagccgcacccccagccgccgcagccgcacccccagccgccgcagccgcacccccagccgccgcagccgcacccccagccgccggagccgcacccctagccgtcggagccgcaccccaagccgccggagaagatcaaggtctgtggtaagaagacgaagcttcagtatctcaccagtcagattaaggcgatcaagaacacccttaagaagaaggtttagcagatctcccatccgtcgtaaaagatccaggtcttctgaacgaggcagatcacccaaacgtctgacagatttgg

SEQ ID NO: 103 - DNA, 5916 bp, Homo sapiens; identical to SEQ ID NO: 102

SEQ ID NO: 104 - DNA, 1494 bp, Homo sapiens
acacagacagcaattctgaggattctgggaatccatcaacaactaggtttacaggttacggttctgtcaaccagactgtcactgtcaagccacctgttcaaattgcttcactaggaaatgagaatggaaaccttttagaagatcccttaaactcacccaagtatcagcatatttcttttatgccaacgttacactgtgtcatgcacaatggtgcccagaagtctgaagttgtcgttcctgcacccaaacccgctgatggcaaaaccatagggatgcttgttcctagtcctgttgctatttctgcaataagggagtctgcaaattcaacccctgttggaatactagggccaacagcttgcactggagaatcggaaaagcaccttgagttactggcttcccctttacctattccatcaaccttccttccacacagtagtactcccgctttgcatcttacagttcagaggctaaagttgccaccaccacagggatcttctgagagctgcacagttaacatcccacaacaaccacccggaagcctgagcatcgcatcaccaaacactgcctttattcctatccataacccaggtagtttcccaggctctcctgttgctaccacggaccccatcacaaaatctgcatcccaagtggtaggactcaatcaaatggtgcctcaaattgagggaaacacagggacagtccctcagcctaccaatgtgaaggtagttcttccagcagctggcctctcagctgctcagccaccagcttcctaccccttaccaggctctccccttgctgccggcgtgttacccagccagaactccagtgtgctcagcacagcagcaacttctccccagccagcgagcgcaggtatcagccaggcccaggcaactgttcctcctgcagttcctacccacaccccaggccctgccccgagcccaagccctgccttgacacacagtaccgcgcagagtgacagcacctcttacatcagtgctgtggggaacacgaacgctaatgggacagtagtgccaccgcagcagatgggctcaggtccttgtggttcttgtgggcgaaggtgcagctgtgggaccaatggaaaccttcagctaaatagttactattatcctaatccaatgcctggaccaatgtaccgagtcccttcattctttactctgccatccatttgcaatggcagctacctcaaccaagcacatcagagcaatggaaaccaacttcctttttttctgcctcagactccatatgcaaatggactggtacatgacccagtcatggggagccaagccaactatggcatgcagcagatggcaggatttgggagattctatcctgtatatccagcacctaacgtagttgccaacaccagtggttcggggcccaagaagaatgggaatgtctcatgttacaattgtggtgtaagcggacactatgcacaggactgtaagcagtcgtccatggaggccaatcaacaag

SEQ ID NO: 105 - DNA, 18 bp, Artificial Sequence
  Description of Artificial Sequence: Synthetic oligonucleotide
agcgagcgcgcccgcagc

SEQ ID NO: 106 - DNA, 18 bp, Artificial Sequence
  Description of Artificial Sequence: Synthetic oligonucleotide
gcgagagcgagcgcgccc

SEQ ID NO: 107 - DNA, 18 bp, Artificial Sequence
  Description of Artificial Sequence: Synthetic oligonucleotide
gctcagcgagagcgagcg

SEQ ID NO: 108 - DNA, 18 bp, Artificial Sequence
  Description of Artificial Sequence: Synthetic oligonucleotide
tccttgctcagcgagagc

SEQ ID NO: 109 - DNA, 18 bp, Artificial Sequence
  Description of Artificial Sequence: Synthetic oligonucleotide
gccgctccttgctcagcg

SEQ ID NO: 110 - DNA, 18 bp, Artificial Sequence
  Description of Artificial Sequence: Synthetic oligonucleotide
ctcccgccgctccttgct

SEQ ID NO: 111 - DNA, 18 bp, Artificial Sequence
  Description of Artificial Sequence: Synthetic oligonucleotide
ccgggctcccgccgctcc

SEQ ID NO: 112 - DNA, 18 bp, Artificial Sequence
  Description of Artificial Sequence: Synthetic oligonucleotide
ccggcccgggctcccgcc

SEQ ID NO: 113 - DNA, 18 bp, Artificial Sequence
  Description of Artificial Sequence: Synthetic oligonucleotide
cgccgccggcccgggctc

SEQ ID NO: 114 - DNA, 18 bp, Artificial Sequence
  Description of Artificial Sequence: Synthetic oligonucleotide
cccgccgccgccggcccg

SEQ ID NO: 115 - DNA, 18 bp, Artificial Sequence
  Description of Artificial Sequence: Synthetic oligonucleotide
cagcccccgccgccgccg

SEQ ID NO: 116 - DNA, 18 bp, Artificial Sequence
  Description of Artificial Sequence: Synthetic oligonucleotide
cgccgcagcccccgccgc

SEQ ID NO: 117 - DNA, 18 bp, Artificial Sequence
  Description of Artificial Sequence: Synthetic oligonucleotide
ccggccgccgcagccccc

SEQ ID NO: 118 - DNA, 18 bp, Artificial Sequence
  Description of Artificial Sequence: Synthetic oligonucleotide
ctgcgccggccgccgcag

SEQ ID NO: 119 - DNA, 18 bp, Artificial Sequence
  Description of Artificial Sequence: Synthetic oligonucleotide
ctcacctgcgccggccgc

SEQ ID NO: 120 - DNA, 18 bp, Artificial Sequence
  Description of Artificial Sequence: Synthetic oligonucleotide
tcgtcctcacctgcgccg

SEQ ID NO: 121 - DNA, 18 bp, Artificial Sequence
  Description of Artificial Sequence: Synthetic oligonucleotide
ccgcctcgtcctcacctg

SEQ ID NO: 122 - DNA, 18 bp, Artificial Sequence
  Description of Artificial Sequence: Synthetic oligonucleotide
gcgccgcctcgtcctcac

SEQ ID NO: 123 - DNA, 18 bp, Artificial Sequence
  Description of Artificial Sequence: Synthetic oligonucleotide
gacgggcgccgcctcgtc

SEQ ID NO: 124 - DNA, 18 bp, Artificial Sequence
  Description of Artificial Sequence: Synthetic oligonucleotide
atgcagacgggcgccgcc

SEQ ID NO: 125 - DNA, 18 bp, Artificial Sequence
  Description of Artificial Sequence: Synthetic oligonucleotide
agccgatgcagacgggcg

SEQ ID NO: 126 - DNA, 18 bp, Artificial Sequence
  Description of Artificial Sequence: Synthetic oligonucleotide
gcaggagccgatgcagac

SEQ ID NO: 127 - DNA, 18 bp, Artificial Sequence
  Description of Artificial Sequence: Synthetic oligonucleotide
acgaggcaggagccgatg

SEQ ID NO: 128 - DNA, 18 bp, Artificial Sequence
  Description of Artificial Sequence: Synthetic oligonucleotide
tgtccacgaggcaggagc

SEQ ID NO: 129 - DNA, 18 bp, Artificial Sequence
  Description of Artificial Sequence: Synthetic oligonucleotide
ggagatgtccacgaggca

SEQ ID NO: 130 - DNA, 18 bp, Artificial Sequence
  Description of Artificial Sequence: Synthetic oligonucleotide
ctgtaggagatgtccacg

SEQ ID NO: 131 - DNA, 18 bp, Artificial Sequence
  Description of Artificial Sequence: Synthetic oligonucleotide
tctcgctgtaggagatgt

SEQ ID NO: 132 - DNA, 18 bp, Artificial Sequence
  Description of Artificial Sequence: Synthetic oligonucleotide
cttggtctcgctgtagga

SEQ ID NO: 133 - DNA, 18 bp, Artificial Sequence
  Description of Artificial Sequence: Synthetic oligonucleotide
ctcctcttggtctcgctg

SEQ ID NO: 134 - DNA, 18 bp, Artificial Sequence
  Description of Artificial Sequence: Synthetic oligonucleotide
aacacgtgcctcctcttg

SEQ ID NO: 135 - DNA, 18 bp, Artificial Sequence
  Description of Artificial Sequence: Synthetic oligonucleotide
gccggaacacgtgcctcc

SEQ ID NO: 136 - DNA, 18 bp, Artificial Sequence
  Description of Artificial Sequence: Synthetic oligonucleotide
ggtcagccggaacacgtg

SEQ ID NO: 137 - DNA, 18 bp, Artificial Sequence
  Description of Artificial Sequence: Synthetic oligonucleotide
gcggtggtcagccggaac

SEQ ID NO: 138 - DNA, 18 bp, Artificial Sequence
  Description of Artificial Sequence: Synthetic oligonucleotide
agtcagcggtggtcagcc

SEQ ID NO: 139 - DNA, 18 bp, Artificial Sequence
  Description of Artificial Sequence: Synthetic oligonucleotide
acagaagtcagcggtggt

SEQ ID NO: 140 - DNA, 18 bp, Artificial Sequence
  Description of Artificial Sequence: Synthetic oligonucleotide
tattcacagaagtcagcg

SEQ ID NO: 141 - DNA, 18 bp, Artificial Sequence
  Description of Artificial Sequence: Synthetic oligonucleotide
agagatattcacagaagt

SEQ ID NO: 142 - DNA, 18 bp, Artificial Sequence
  Description of Artificial Sequence: Synthetic oligonucleotide
ctgaaagagatattcaca

SEQ ID NO: 143 - DNA, 18 bp, Artificial Sequence
  Description of Artificial Sequence: Synthetic oligonucleotide
agcctgaaagagatattc

SEQ ID NO: 144 - DNA, 18 bp, Artificial Sequence
  Description of Artificial Sequence: Synthetic oligonucleotide
tcctcagcctgaaagaga

SEQ ID NO: 145 - DNA, 18 bp, Artificial Sequence
  Description of Artificial Sequence: Synthetic oligonucleotide
cccggtcctcagcctgaa

SEQ ID NO: 146 - DNA, 18 bp, Artificial Sequence
  Description of Artificial Sequence: Synthetic oligonucleotide
gtcatcccggtcctcagc

SEQ ID NO: 147 - DNA, 18 bp, Artificial Sequence
  Description of Artificial Sequence: Synthetic oligonucleotide
agcatgtcatcccggtcc

SEQ ID NO: 148 - DNA, 18 bp, Artificial Sequence
  Description of Artificial Sequence: Synthetic oligonucleotide
agcccagcatgtcatccc

SEQ ID NO: 149 - DNA, 18 bp, Artificial Sequence
  Description of Artificial Sequence: Synthetic oligonucleotide
gatccagcccagcatgtc

SEQ ID NO: 150 - DNA, 18 bp, Artificial Sequence
  Description of Artificial Sequence: Synthetic oligonucleotide
gctctgatccagcccagc

SEQ ID NO: 151 - DNA, 18 bp, Artificial Sequence
  Description of Artificial Sequence: Synthetic oligonucleotide
ggatcgctctgatccagc

SEQ ID NO: 152 - DNA, 18 bp, Artificial Sequence
  Description of Artificial Sequence: Synthetic oligonucleotide
ctcccggatcgctctgat

SEQ ID NO: 153 - DNA, 18 bp, Artificial Sequence
  Description of Artificial Sequence: Synthetic oligonucleotide
ctgttctcccggatcgct

SEQ ID NO: 154 - DNA, 18 bp, Artificial Sequence
  Description of Artificial Sequence: Synthetic oligonucleotide
gattcattatcaaatgtg

SEQ ID NO: 155 - DNA, 18 bp, Artificial Sequence
  Description of Artificial Sequence: Synthetic oligonucleotide
tatgtgattcattatcaa

SEQ ID NO: 156 - DNA, 18 bp, Artificial Sequence
  Description of Artificial Sequence: Synthetic oligonucleotide
agcgctatgtgattcatt

SEQ ID NO: 157 - DNA, 18 bp, Artificial Sequence
  Description of Artificial Sequence: Synthetic oligonucleotide
gtgcaagcgctatgtgat

SEQ ID NO: 158 - DNA, 18 bp, Artificial Sequence
  Description of Artificial Sequence: Synthetic oligonucleotide
tctgagtgcaagcgctat

SEQ ID NO: 159 - DNA, 18 bp, Artificial Sequence
  Description of Artificial Sequence: Synthetic oligonucleotide
tgcgctctgagtgcaagc

SEQ ID NO: 160 - DNA, 18 bp, Artificial Sequence
  Description of Artificial Sequence: Synthetic oligonucleotide
accagtgcgctctgagtg

SEQ ID NO: 161 - DNA, 18 bp, Artificial Sequence
  Description of Artificial Sequence: Synthetic oligonucleotide
cgcttaccagtgcgctct

SEQ ID NO: 162 - DNA, 18 bp, Artificial Sequence
  Description of Artificial Sequence: Synthetic oligonucleotide
gcgtccgcttaccagtgc

SEQ ID NO: 163 - DNA, 18 bp, Artificial Sequence
  Description of Artificial Sequence: Synthetic oligonucleotide
ggagggcgtccgcttacc

SEQ ID NO: 164 - DNA, 18 bp, Artificial Sequence
  Description of Artificial Sequence: Synthetic oligonucleotide
gctctggagggcgtccgc

SEQ ID NO: 165 - DNA, 18 bp, Artificial Sequence
  Description of Artificial Sequence: Synthetic oligonucleotide
ggtgggctctggagggcg

SEQ ID NO: 166 - DNA, 18 bp, Artificial Sequence
  Description of Artificial Sequence: Synthetic oligonucleotide
gcgcgggtgggctctgga

SEQ ID NO: 167 - DNA, 18 bp, Artificial Sequence
  Description of Artificial Sequence: Synthetic oligonucleotide
tactggcgcgggtgggct

SEQ ID NO: 168 - DNA, 18 bp, Artificial Sequence
  Description of Artificial Sequence: Synthetic oligonucleotide
gccactactggcgcgggt

SEQ ID NO: 169 - DNA, 18 bp, Artificial Sequence
  Description of Artificial Sequence: Synthetic oligonucleotide
acatcgccactactggcg

SEQ ID NO: 170 - DNA, 18 bp, Artificial Sequence
  Description of Artificial Sequence: Synthetic oligonucleotide
ccggcacatcgccactac

SEQ ID NO: 171 - DNA, 18 bp, Artificial Sequence
  Description of Artificial Sequence: Synthetic oligonucleotide
cgccgccggcacatcgcc

SEQ ID NO: 172 - DNA, 18 bp, Artificial Sequence
  Description of Artificial Sequence: Synthetic oligonucleotide
gccgccgccgccggcaca

SEQ ID NO: 173 - DNA, 18 bp, Artificial Sequence
  Description of Artificial Sequence: Synthetic oligonucleotide
cggaggccgccgccgccg

SEQ ID NO: 174 - DNA, 18 bp, Artificial Sequence
  Description of Artificial Sequence: Synthetic oligonucleotide
caccgcggaggccgccgc

SEQ ID NO: 175 - DNA, 18 bp, Artificial Sequence
  Description of Artificial Sequence: Synthetic oligonucleotide
tccgccaccgcggaggcc

SEQ ID NO: 176 - DNA, 18 bp, Artificial Sequence
  Description of Artificial Sequence: Synthetic oligonucleotide
ctggctccgccaccgcgg

SEQ ID NO: 177 - DNA, 18 bp, Artificial Sequence
  Description of Artificial Sequence: Synthetic oligonucleotide
gcttgctggctccgccac

SEQ ID NO: 178 - DNA, 18 bp, Artificial Sequence
  Description of Artificial Sequence: Synthetic oligonucleotide
acatcgcttgctggctcc

SEQ ID NO: 179 - DNA, 18 bp, Artificial Sequence
  Description of Artificial Sequence: Synthetic oligonucleotide
tgtttacatcgcttgctg

SEQ ID NO: 180 - DNA, 18 bp, Artificial Sequence
  Description of Artificial Sequence: Synthetic oligonucleotide
gcgtctgtttacatcgct

SEQ ID NO: 181 - DNA, 18 bp, Artificial Sequence
  Description of Artificial Sequence: Synthetic oligonucleotide
gaagtgcgtctgtttaca

SEQ ID NO: 182 - DNA, 18 bp, Artificial Sequence
  Description of Artificial Sequence: Synthetic oligonucleotide
gaacagaagtgcgtctgt

SEQ ID NO: 183 - DNA, 18 bp, Artificial Sequence
  Description of Artificial Sequence: Synthetic oligonucleotide
gaagagaacagaagtgcg

SEQ ID NO: 184 - DNA, 18 bp, Artificial Sequence
  Description of Artificial Sequence: Synthetic oligonucleotide
ttgcagaagagaacagaa

SEQ ID NO: 185 - DNA, 18 bp, Artificial Sequence
  Description of Artificial Sequence: Synthetic oligonucleotide
tcgatttgcagaagagaa

SEQ ID NO: 186 - DNA, 18 bp, Artificial Sequence
  Description of Artificial Sequence: Synthetic oligonucleotide
acttttcgatttgcagaa

SEQ ID NO: 187 - DNA, 18 bp, Artificial Sequence
  Description of Artificial Sequence: Synthetic oligonucleotide
cttacacttttcgatttg

SEQ ID NO: 188 - DNA, 18 bp, Artificial Sequence
  Description of Artificial Sequence: Synthetic oligonucleotide
gggggcttacacttttcg

SEQ ID NO: 189 - DNA, 18 bp, Artificial Sequence
  Description of Artificial Sequence: Synthetic oligonucleotide
ctttggggggcttacact

SEQ ID NO: 190 - DNA, 18 bp, Artificial Sequence
  Description of Artificial Sequence: Synthetic oligonucleotide
agactttggggggcttac

SEQ ID NO: 191 - DNA, 18 bp, Artificial Sequence
  Description of Artificial Sequence: Synthetic oligonucleotide
ttggcagactttgggggg

SEQ ID NO: 192 - DNA, 18 bp, Artificial Sequence
  Description of Artificial Sequence: Synthetic oligonucleotide
tgttcttggcagactttg

SEQ ID NO: 193 - DNA, 18 bp, Artificial Sequence
  Description of Artificial Sequence: Synthetic oligonucleotide
ttcagtgttcttggcaga

SEQ ID NO: 194 - DNA, 18 bp, Artificial Sequence
  Description of Artificial Sequence: Synthetic oligonucleotide
tgggtttcagtgttcttg

SEQ ID NO: 195 - DNA, 18 bp, Artificial Sequence
  Description of Artificial Sequence: Synthetic oligonucleotide
ttggctgggtttcagtgt

SEQ ID NO: 196 - DNA, 18 bp, Artificial Sequence
  Description of Artificial Sequence: Synthetic oligonucleotide
agaagttggctgggtttc

SEQ ID NO: 197 - DNA, 18 bp, Artificial Sequence
  Description of Artificial Sequence: Synthetic oligonucleotide
tgaggagaagttggctgg

SEQ ID NO: 198 - DNA, 18 bp, Artificial Sequence
  Description of Artificial Sequence: Synthetic oligonucleotide
gtccctagctgaggagaa

SEQ ID NO: 199 - DNA, 18 bp, Artificial Sequence
  Description of Artificial Sequence: Synthetic oligonucleotide
ttttggtccctagctgag

SEQ ID NO: 200 - DNA, 18 bp, Artificial Sequence
  Description of Artificial Sequence: Synthetic oligonucleotide
aaaggttttggtccctag

SEQ ID NO: 201 - DNA, 18 bp, Artificial Sequence
  Description of Artificial Sequence: Synthetic oligonucleotide
gacaaaaaggttttggtc

SEQ ID NO: 202 - DNA, 18 bp, Artificial Sequence
  Description of Artificial Sequence: Synthetic oligonucleotide
ctacagacaaaaaggttt

SEQ ID NO: 203 - DNA, 18 bp, Artificial Sequence
  Description of Artificial Sequence: Synthetic oligonucleotide
ggactacagacaaaaagg

SEQ ID NO: 204 - DNA, 18 bp, Artificial Sequence
  Description of Artificial Sequence: Synthetic oligonucleotide
cggaaggactacagacaa

SEQ ID NO: 205 - DNA, 18 bp, Artificial Sequence
  Description of Artificial Sequence: Synthetic oligonucleotide
aacctcggaaggactaca

SEQ ID NO: 206 - DNA, 18 bp, Artificial Sequence
  Description of Artificial Sequence: Synthetic oligonucleotide
tctccaacctcggaagga

SEQ ID NO: 207 - DNA, 18 bp, Artificial Sequence
  Description of Artificial Sequence: Synthetic oligonucleotide
aagagtctccaacctcgg

SEQ ID NO: 208 - DNA, 18 bp, Artificial Sequence
  Description of Artificial Sequence: Synthetic oligonucleotide
tgcagaagagtctccaac

SEQ ID NO: 209 - DNA, 18 bp, Artificial Sequence
  Description of Artificial Sequence: Synthetic oligonucleotide
ttggctgcagaagagtct

SEQ ID NO: 210 - DNA, 18 bp, Artificial Sequence
  Description of Artificial Sequence: Synthetic oligonucleotide
tttccttggctgcagaag

SEQ ID NO: 211 - DNA, 18 bp, Artificial Sequence
  Description of Artificial Sequence: Synthetic oligonucleotide
gaccttttccttggctgc

SEQ ID NO: 212 - DNA, 18 bp, Artificial Sequence
  Description of Artificial Sequence: Synthetic oligonucleotide
tccgcgaccttttccttg

SEQ ID NO: 213 - DNA, 18 bp, Artificial Sequence
  Description of Artificial Sequence: Synthetic oligonucleotide
tgtgctccgcgacctttt

SEQ ID NO: 214 - DNA, 18 bp, Artificial Sequence
  Description of Artificial Sequence: Synthetic oligonucleotide
ccgcatgtgctccgcgac

SEQ ID NO: 215 - DNA, 18 bp, Artificial Sequence
  Description of Artificial Sequence: Synthetic oligonucleotide
agtctccgcatgtgctcc

SEQ ID NO: 216 - DNA, 18 bp, Artificial Sequence
  Description of Artificial Sequence: Synthetic oligonucleotide
ctcggagtctccgcatgt

SEQ ID NO: 217 - DNA, 18 bp, Artificial Sequence
  Description of Artificial Sequence: Synthetic oligonucleotide
tccacctcggagtctccg

SEQ ID NO: 218 - DNA, 18 bp, Artificial Sequence
  Description of Artificial Sequence: Synthetic oligonucleotide
aggcacaggaaaggctgg

SEQ ID NO: 219 - DNA, 18 bp, Artificial Sequence
  Description of Artificial Sequence: Synthetic oligonucleotide
taggcaggcacaggaaag

SEQ ID NO: 220 - DNA, 18 bp, Artificial Sequence
  Description of Artificial Sequence: Synthetic oligonucleotide
ccgagtaggcaggcacag

SEQ ID NO: 221 - DNA, 18 bp, Artificial Sequence
  Description of Artificial Sequence: Synthetic oligonucleotide
ctccaccgagtaggcagg

SEQ ID NO: 222 - DNA, 18 bp, Artificial Sequence
  Description of Artificial Sequence: Synthetic oligonucleotide
ggcacctccaccgagtag

SEQ ID NO: 223 - DNA, 18 bp, Artificial Sequence
  Description of Artificial Sequence: Synthetic oligonucleotide
cctccggcacctccaccg

SEQ ID NO: 224 - DNA, 18 bp, Artificial Sequence
  Description of Artificial Sequence: Synthetic oligonucleotide
cacatcctccggcacctc

SEQ ID NO: 225 - DNA, 18 bp, Artificial Sequence
  Description of Artificial Sequence: Synthetic oligonucleotide
gcaggcacatcctccggc

SEQ ID NO: 226 - DNA, 18 bp, Artificial Sequence
  Description of Artificial Sequence: Synthetic oligonucleotide
tccctgcaggcacatcct

SEQ ID NO: 227 - DNA, 18 bp, Artificial Sequence
  Description of Artificial Sequence: Synthetic oligonucleotide
cagggtccctgcaggcac

SEQ ID NO: 228 - DNA, 18 bp, Artificial Sequence
  Description of Artificial Sequence: Synthetic oligonucleotide
agcagcagggtccctgca

SEQ ID NO: 229 - DNA, 18 bp, Artificial Sequence
  Description of Artificial Sequence: Synthetic oligonucleotide
gctgcagcagcagggtcc

SEQ ID NO: 230 - DNA, 18 bp, Artificial Sequence
  Description of Artificial Sequence: Synthetic oligonucleotide
ctgtagctgcagcagcag

SEQ ID NO: 231 - DNA, 18 bp, Artificial Sequence
  Description of Artificial Sequence: Synthetic oligonucleotide
tgagcctgtagctgcagc

SEQ ID NO: 232 - DNA, 18 bp, Artificial Sequence
  Description of Artificial Sequence: Synthetic oligonucleotide
ggtcatgagcctgtagct

SEQ ID NO: 233 - DNA, 18 bp, Artificial Sequence
  Description of Artificial Sequence: Synthetic oligonucleotide
atcagggtcatgagcctg

SEQ ID NO: 234 - DNA, 18 bp, Artificial Sequence
  Description of Artificial Sequence: Synthetic oligonucleotide
ccagcatcagggtcatga

SEQ ID NO: 235 - DNA, 18 bp, Artificial Sequence
  Description of Artificial Sequence: Synthetic oligonucleotide
tagctccagcatcagggt

SEQ ID NO: 236 - DNA, 18 bp, Artificial Sequence
  Description of Artificial Sequence: Synthetic oligonucleotide
gccattagctccagcatc

SEQ ID NO: 237 - DNA, 18 bp, Artificial Sequence
  Description of Artificial Sequence: Synthetic oligonucleotide
acatggccattagctcca

SEQ ID NO: 238 - DNA, 18 bp, Artificial Sequence
  Description of Artificial Sequence: Synthetic oligonucleotide
aggtcacatggccattag

SEQ ID NO: 239 - DNA, 18 bp, Artificial Sequence
  Description of Artificial Sequence: Synthetic oligonucleotide
gtagtaggtcacatggcc

SEQ ID NO: 240 - DNA, 18 bp, Artificial Sequence
  Description of Artificial Sequence: Synthetic oligonucleotide
cccaggtagtaggtcaca

SEQ ID NO: 241 - DNA, 18 bp, Artificial Sequence
  Description of Artificial Sequence: Synthetic oligonucleotide
cggcgcccaggtagtagg

SEQ ID NO: 242 - DNA, 18 bp, Artificial Sequence
  Description of Artificial Sequence: Synthetic oligonucleotide
tgtaccggcgcccaggta

SEQ ID NO: 243 - DNA, 18 bp, Artificial Sequence
  Description of Artificial Sequence: Synthetic oligonucleotide
cctgctgtaccggcgccc

SEQ ID NO: 244 - DNA, 18 bp, Artificial Sequence
  Description of Artificial Sequence: Synthetic oligonucleotide
aggctcctgctgtaccgg

SEQ ID NO: 245 - DNA, 18 bp, Artificial Sequence
  Description of Artificial Sequence: Synthetic oligonucleotide
caggaaggctcctgctgt

SEQ ID NO: 246 - DNA, 18 bp, Artificial Sequence
  Description of Artificial Sequence: Synthetic oligonucleotide
tccagcaggaaggctcct

SEQ ID NO: 247 - DNA, 18 bp, Artificial Sequence
  Description of Artificial Sequence: Synthetic oligonucleotide
tgggctccagcaggaagg

SEQ ID NO: 248 - DNA, 18 bp, Artificial Sequence
  Description of Artificial Sequence: Synthetic oligonucleotide
agagctgggctccagcag

SEQ ID NO: 249 - DNA, 18 bp, Artificial Sequence
  Description of Artificial Sequence: Synthetic oligonucleotide
tctccagagctgggctcc

SEQ ID NO: 250 - DNA, 18 bp, Artificial Sequence
  Description of Artificial Sequence: Synthetic oligonucleotide
gcagttctccagagctgg

SEQ ID NO: 251 - DNA, 18 bp, Artificial Sequence
  Description of Artificial Sequence: Synthetic oligonucleotide
tgtgcgcagttctccaga

SEQ ID NO: 252 - DNA, 18 bp, Artificial Sequence
  Description of Artificial Sequence: Synthetic oligonucleotide
gcagctgtgcgcagttct

SEQ ID NO: 253 - DNA, 18 bp, Artificial Sequence
  Description of Artificial Sequence: Synthetic oligonucleotide
aggctgcagctgtgcgca

SEQ ID NO: 254 - DNA, 18 bp, Artificial Sequence
  Description of Artificial Sequence: Synthetic oligonucleotide
gtccaaggctgcagctgt

SEQ ID NO: 255 - DNA, 18 bp, Artificial Sequence
  Description of Artificial Sequence: Synthetic oligonucleotide
tctctgtccaaggctgca

SEQ ID NO: 256 - DNA, 18 bp, Artificial Sequence
  Description of Artificial Sequence: Synthetic oligonucleotide
actgttctctgtccaagg

SEQ ID NO: 257 - DNA, 18 bp, Artificial Sequence
  Description of Artificial Sequence: Synthetic oligonucleotide
gggacactgttctctgtc

SEQ ID NO: 258 - DNA, 18 bp, Artificial Sequence
  Description of Artificial Sequence: Synthetic oligonucleotide
tagctgggacactgttct

SEQ ID NO: 259 - DNA, 18 bp, Artificial Sequence
  Description of Artificial Sequence: Synthetic oligonucleotide
aggtgtagctgggacact

SEQ ID NO: 260 - DNA, 18 bp, Artificial Sequence
  Description of Artificial Sequence: Synthetic oligonucleotide
agaaaaggtgtagctggg

SEQ ID NO: 261 - DNA, 18 bp, Artificial Sequence
  Description of Artificial Sequence: Synthetic oligonucleotide
ctcacagaaaaggtgtag

SEQ ID NO: 262 - DNA, 18 bp, Artificial Sequence
  Description of Artificial Sequence: Synthetic oligonucleotide
ctgcactcacagaaaagg

SEQ ID NO: 263 - DNA, 18 bp, Artificial Sequence
  Description of Artificial Sequence: Synthetic oligonucleotide
atccactgcactcacaga

SEQ ID NO: 264 - DNA, 18 bp, Artificial Sequence
  Description of Artificial Sequence: Synthetic oligonucleotide
accatccactgcactcac

SEQ ID NO: 265 - DNA, 18 bp, Artificial Sequence
  Description of Artificial Sequence: Synthetic oligonucleotide
gctgcaccatccactgca

SEQ ID NO: 266 - DNA, 18 bp, Artificial Sequence
  Description of Artificial Sequence: Synthetic oligonucleotide
cagcagctgcaccatcca

SEQ ID NO: 267 - DNA, 18 bp, Artificial Sequence
  Description of Artificial Sequence: Synthetic oligonucleotide
gggcccagcagctgcacc

SEQ ID NO: 268 - DNA, 18 bp, Artificial Sequence
  Description of Artificial Sequence: Synthetic oligonucleotide
cttaggggcccagcagct

SEQ ID NO: 269 - DNA, 18 bp, Artificial Sequence
  Description of Artificial Sequence: Synthetic oligonucleotide
tggtgcttaggggcccag

SEQ ID NO: 270 - DNA, 18 bp, Artificial Sequence
  Description of Artificial Sequence: Synthetic oligonucleotide
cactgtggtgcttagggg

SEQ ID NO: 271 - DNA, 18 bp, Artificial Sequence
  Description of Artificial Sequence: Synthetic oligonucleotide
acagacactgtggtgctt

SEQ ID NO: 272 - DNA, 18 bp, Artificial Sequence
  Description of Artificial Sequence: Synthetic oligonucleotide
tggtgacagacactgtgg

SEQ ID NO: 273 - DNA, 18 bp, Artificial Sequence
  Description of Artificial Sequence: Synthetic oligonucleotide
cgtgatggtgacagacac

SEQ ID NO: 274 - DNA, 18 bp, Artificial Sequence
  Description of Artificial Sequence: Synthetic oligonucleotide
cgcaccgtgatggtgaca

SEQ ID NO: 275 - DNA, 18 bp, Artificial Sequence
  Description of Artificial Sequence: Synthetic oligonucleotide
catcgcgcaccgtgatgg

SEQ ID NO: 276 - DNA, 18 bp, Artificial Sequence
  Description of Artificial Sequence: Synthetic oligonucleotide
attgacatcgcgcaccgt

SEQ ID NO: 277 - DNA, 18 bp, Artificial Sequence
  Description of Artificial Sequence: Synthetic oligonucleotide
tggtcattgacatcgcgc

SEQ ID NO: 278 - DNA, 18 bp, Artificial Sequence
  Description of Artificial Sequence: Synthetic oligonucleotide
gtgcatggtcattgacat

SEQ ID NO: 279 - DNA, 18 bp, Artificial Sequence
  Description of Artificial Sequence: Synthetic oligonucleotide
ggtgggtgcatggtcatt

SEQ ID NO: 280 - DNA, 18 bp, Artificial Sequence
  Description of Artificial Sequence: Synthetic oligonucleotide
gggaaggtgggtgcatgg

SEQ ID NO: 281 - DNA, 18 bp, Artificial Sequence
  Description of Artificial Sequence: Synthetic oligonucleotide
tggtggggaaggtgggtg

SEQ ID NO: 282 - DNA, 18 bp, Artificial Sequence
  Description of Artificial Sequence: Synthetic oligonucleotide
aggactggtggggaaggt

SEQ ID NO: 283 - DNA, 18 bp, Artificial Sequence
  Description of Artificial Sequence: Synthetic oligonucleotide
cgcagaggactggtgggg

SEQ ID NO: 284 - DNA, 18 bp, Artificial Sequence
  Description of Artificial Sequence: Synthetic oligonucleotide
gtaggcgcagaggactgg

SEQ ID NO: 285 - DNA, 18 bp, Artificial Sequence
  Description of Artificial Sequence: Synthetic oligonucleotide
cagacgtaggcgcagagg

SEQ ID NO: 286 - DNA, 18 bp, Artificial Sequence
  Description of Artificial Sequence: Synthetic oligonucleotide
cggggcagacgtaggcgc

SEQ ID NO: 287 - DNA, 18 bp, Artificial Sequence
  Description of Artificial Sequence: Synthetic oligonucleotide
cctgggcggggcagacgt

SEQ ID NO: 288 - DNA, 18 bp, Artificial Sequence
  Description of Artificial Sequence: Synthetic oligonucleotide
tggggcctgggcggggca

SEQ ID NO: 289 - DNA, 18 bp, Artificial Sequence
  Description of Artificial Sequence: Synthetic oligonucleotide
gaagctggggcctgggcg

SEQ ID NO: 290 - DNA, 18 bp, Artificial Sequence
  Description of Artificial Sequence: Synthetic oligonucleotide
gtactgaagctggggcct

SEQ ID NO: 291 - DNA, 18 bp, Artificial Sequence
  Description of Artificial Sequence: Synthetic oligonucleotide
ttggggtactgaagctgg

SEQ ID NO: 292 - DNA, 18 bp, Artificial Sequence
  Description of Artificial Sequence: Synthetic oligonucleotide
cagggttggggtactgaa

SEQ ID NO: 293 - DNA, 18 bp, Artificial Sequence
  Description of Artificial Sequence: Synthetic oligonucleotide
agagccagggttggggta

SEQ ID NO: 294 - DNA, 18 bp, Artificial Sequence
  Description of Artificial Sequence: Synthetic oligonucleotide
tggccagagccagggttg

SEQ ID NO: 295 - DNA, 18 bp, Artificial Sequence
  Description of Artificial Sequence: Synthetic oligonucleotide
cagtgtggccagagccag

SEQ ID NO: 296 - DNA, 18 bp, Artificial Sequence
  Description of Artificial Sequence: Synthetic oligonucleotide
gctctcagtgtggccaga

SEQ ID NO: 297 - DNA, 18 bp, Artificial Sequence
  Description of Artificial Sequence: Synthetic oligonucleotide
cttcagctctcagtgtgg

SEQ ID NO: 298 - DNA, 18 bp, Artificial Sequence
  Description of Artificial Sequence: Synthetic oligonucleotide
acgatcttcagctctcag

SEQ ID NO: 299 - DNA, 18 bp, Artificial Sequence
  Description of Artificial Sequence: Synthetic oligonucleotide
gcatcacgatcttcagct

SEQ ID NO: 300 - DNA, 18 bp, Artificial Sequence
  Description of Artificial Sequence: Synthetic oligonucleotide
caccagcatcacgatctt

SEQ ID NO: 301 - DNA, 18 bp, Artificial Sequence
  Description of Artificial Sequence: Synthetic oligonucleotide
attggcaccagcatcacg

SEQ ID NO: 302 - DNA, 18 bp, Artificial Sequence
  Description of Artificial Sequence: Synthetic oligonucleotide
gaagcattggcaccagca

SEQ ID NO: 303 - DNA, 18 bp, Artificial Sequence
  Description of Artificial Sequence: Synthetic oligonucleotide
gaatggaagcattggcac

SEQ ID NO: 304 - DNA, 18 bp, Artificial Sequence
  Description of Artificial Sequence: Synthetic oligonucleotide
gtacagaatggaagcatt

SEQ ID NO: 305 - DNA, 18 bp, Artificial Sequence
  Description of Artificial Sequence: Synthetic oligonucleotide
agccggtacagaatggaa

SEQ ID NO: 306 - DNA, 18 bp, Artificial Sequence
  Description of Artificial Sequence: Synthetic oligonucleotide
ctgccagccggtacagaa

SEQ ID NO: 307 - DNA, 18 bp, Artificial Sequence
  Description of Artificial Sequence: Synthetic oligonucleotide
tgcctgccagccggtaca

SEQ ID NO: 308 - DNA, 18 bp, Artificial Sequence
  Description of Artificial Sequence: Synthetic oligonucleotide
tggtgtgcctgccagccg

SEQ ID NO: 309 - DNA, 18 bp, Artificial Sequence
  Description of Artificial Sequence: Synthetic oligonucleotide
ggaggtggtgtgcctgcc

SEQ ID NO: 310 - DNA, 18 bp, Artificial Sequence
  Description of Artificial Sequence: Synthetic oligonucleotide
tgccaggaggtggtgtgc

SEQ ID NO: 311 - DNA, 18 bp, Artificial Sequence
  Description of Artificial Sequence: Synthetic oligonucleotide
agtagtgccaggaggtgg

SEQ ID NO: 312 - DNA, 18 bp, Artificial Sequence
  Description of Artificial Sequence: Synthetic oligonucleotide
tccacagtagtgccagga

SEQ ID NO: 313 - DNA, 18 bp, Artificial Sequence
  Description of Artificial Sequence: Synthetic oligonucleotide
aagagtccacagtagtgc

SEQ ID NO: 314 - DNA, 18 bp, Artificial Sequence
  Description of Artificial Sequence: Synthetic oligonucleotide
agtgtaagagtccacagt

SEQ ID NO: 315 - DNA, 18 bp, Artificial Sequence
  Description of Artificial Sequence: Synthetic oligonucleotide
tcaccagtgtaagagtcc

SEQ ID NO: 316 - DNA, 18 bp, Artificial Sequence
  Description of Artificial Sequence: Synthetic oligonucleotide
ggatttcaccagtgtaag

SEQ ID NO: 317 - DNA, 18 bp, Artificial Sequence
  Description of Artificial Sequence: Synthetic oligonucleotide
cacgcggatttcaccagt

SEQ ID NO: 318 - DNA, 18 bp, Artificial Sequence
  Description of Artificial Sequence: Synthetic oligonucleotide
cgggccacgcggatttca

SEQ ID NO: 319 - DNA, 18 bp, Artificial Sequence
  Description of Artificial Sequence: Synthetic oligonucleotide
gagagcgggccacgcgga

SEQ ID NO: 320 - DNA, 18 bp, Artificial Sequence
  Description of Artificial Sequence: Synthetic oligonucleotide
tacaggagagcgggccac

SEQ ID NO: 321 - DNA, 18 bp, Artificial Sequence
  Description of Artificial Sequence: Synthetic oligonucleotide
agagctacaggagagcgg

SEQ ID NO: 322 - DNA, 18 bp, Artificial Sequence
  Description of Artificial Sequence: Synthetic oligonucleotide
ggcctagagctacaggag

SEQ ID NO: 323 - DNA, 18 bp, Artificial Sequence
  Description of Artificial Sequence: Synthetic oligonucleotide
tcgggggcctagagctac

SEQ ID NO: 324 - DNA, 18 bp, Artificial Sequence
  Description of Artificial Sequence: Synthetic oligonucleotide
cgatctcgggggcctaga

SEQ ID NO: 325 - DNA, 18 bp, Artificial Sequence
  Description of Artificial Sequence: Synthetic oligonucleotide
ggacacgatctcgggggc

SEQ ID NO: 326 - DNA, 18 bp, Artificial Sequence
  Description of Artificial Sequence: Synthetic oligonucleotide
gaagaggacacgatctcg

SEQ ID NO: 327 - DNA, 18 bp, Artificial Sequence
  Description of Artificial Sequence: Synthetic oligonucleotide
acaatgaagaggacacga

SEQ ID NO: 328 - DNA, 18 bp, Artificial Sequence
  Description of Artificial Sequence: Synthetic oligonucleotide
tggccacaatgaagagga

SEQ ID NO: 329 - DNA, 18 bp, Artificial Sequence
  Description of Artificial Sequence: Synthetic oligonucleotide
atcagtggccacaatgaa

SEQ ID NO: 330 - DNA, 18 bp, Artificial Sequence
  Description of Artificial Sequence: Synthetic oligonucleotide
ccaagatcagtggccaca

SEQ ID NO: 331 - DNA, 18 bp, Artificial Sequence
  Description of Artificial Sequence: Synthetic oligonucleotide
gacggccaagatcagtgg

SEQ ID NO: 332 - DNA, 18 bp, Artificial Sequence
  Description of Artificial Sequence: Synthetic oligonucleotide
agctggacggccaagatc

SEQ ID NO: 333 - DNA, 18 bp, Artificial Sequence
  Description of Artificial Sequence: Synthetic oligonucleotide
gagcgagctggacggcca

SEQ ID NO: 334 - DNA, 18 bp, Artificial Sequence
  Description of Artificial Sequence: Synthetic oligonucleotide
tggcagagcgagctggac

SEQ ID NO: 335 - DNA, 18 bp, Artificial Sequence
  Description of Artificial Sequence: Synthetic oligonucleotide
cccgcttcttctcctcca

SEQ ID NO: 336 - DNA, 18 bp, Artificial Sequence
  Description of Artificial Sequence: Synthetic oligonucleotide
ctctgcccgcttcttctc

SEQ ID NO: 337 - DNA, 18 bp, Artificial Sequence
  Description of Artificial Sequence: Synthetic oligonucleotide
ccaacctctgcccgcttc

SEQ ID NO: 338 - DNA, 18 bp, Artificial Sequence
  Description of Artificial Sequence: Synthetic oligonucleotide
ctttcccaacctctgccc

SEQ ID NO: 339 - DNA, 18 bp, Artificial Sequence
  Description of Artificial Sequence: Synthetic oligonucleotide
ttcgtctttcccaacctc

SEQ ID NO: 340 - DNA, 18 bp, Artificial Sequence
  Description of Artificial Sequence: Synthetic oligonucleotide
actctttcgtctttccca

SEQ ID NO: 341 - DNA, 18 bp, Artificial Sequence
  Description of Artificial Sequence: Synthetic oligonucleotide
tgattactctttcgtctt

SEQ ID NO: 342 - DNA, 18 bp, Artificial Sequence
  Description of Artificial Sequence: Synthetic oligonucleotide
ttctgtgattactctttc

SEQ ID NO: 343 - DNA, 18 bp, Artificial Sequence
  Description of Artificial Sequence: Synthetic oligonucleotide
atttcttctgtgattact

SEQ ID NO: 344 - DNA, 18 bp, Artificial Sequence
  Description of Artificial Sequence: Synthetic oligonucleotide
cattcatttcttctgtga

SEQ ID NO: 345 - DNA, 18 bp, Artificial Sequence
  Description of Artificial Sequence: Synthetic oligonucleotide
tttaccattcatttcttc

SEQ ID NO: 346 - DNA, 18 bp, Artificial Sequence
  Description of Artificial Sequence: Synthetic oligonucleotide
atctctttaccattcatt

SEQ ID NO: 347 - DNA, 18 bp, Artificial Sequence
  Description of Artificial Sequence: Synthetic oligonucleotide
gtgatatctctttaccat

SEQ ID NO: 348 - DNA, 18 bp, Artificial Sequence
  Description of Artificial Sequence: Synthetic oligonucleotide
caggtgatatctctttac

SEQ ID NO: 349 - DNA, 18 bp, Artificial Sequence
  Description of Artificial Sequence: Synthetic oligonucleotide
actcccaggtgatatctc

SEQ ID NO: 350 - DNA, 18 bp, Artificial Sequence
  Description of Artificial Sequence: Synthetic oligonucleotide
ggaccactcccaggtgat

SEQ ID NO: 351 - DNA, 18 bp, Artificial Sequence
  Description of Artificial Sequence: Synthetic oligonucleotide
ccccaggaccactcccag

SEQ ID NO: 352 - DNA, 18 bp, Artificial Sequence
  Description of Artificial Sequence: Synthetic oligonucleotide
aatctccccaggaccact

SEQ ID NO: 353 - DNA, 18 bp, Artificial Sequence
  Description of Artificial Sequence: Synthetic oligonucleotide
ttacgaatctccccagga

SEQ ID NO: 354 - DNA, 18 bp, Artificial Sequence
  Description of Artificial Sequence: Synthetic oligonucleotide
ccaccttacgaatctccc

SEQ ID NO: 355 - DNA, 18 bp, Artificial Sequence
  Description of Artificial Sequence: Synthetic oligonucleotide
aggctccaccttacgaat

SEQ ID NO: 356 - DNA, 18 bp, Artificial Sequence
  Description of Artificial Sequence: Synthetic oligonucleotide
gtcacaggctccacctta

SEQ ID NO: 357 - DNA, 18 bp, Artificial Sequence
  Description of Artificial Sequence: Synthetic oligonucleotide
tttgtgtcacaggctcca

SEQ ID NO: 358 - DNA, 18 bp, Artificial Sequence
  Description of Artificial Sequence: Synthetic oligonucleotide
agtctttttgtgtcacag

SEQ ID NO: 359 - DNA, 18 bp, Artificial Sequence
  Description of Artificial Sequence: Synthetic oligonucleotide
ggtggagtctttttgtgt

SEQ ID NO: 360 - DNA, 18 bp, Artificial Sequence
  Description of Artificial Sequence: Synthetic oligonucleotide
agggaggtggagtctttt

SEQ ID NO: 361 - DNA, 18 bp, Artificial Sequence
  Description of Artificial Sequence: Synthetic oligonucleotide
aagacagggaggtggagt

SEQ ID NO: 362 - DNA, 18 bp, Artificial Sequence
  Description of Artificial Sequence: Synthetic oligonucleotide
ctcagaagacagggaggt

SEQ ID NO: 363 - DNA, 18 bp, Artificial Sequence
  Description of Artificial Sequence: Synthetic oligonucleotide
ctgctctcagaagacagg

SEQ ID NO: 364 - DNA, 18 bp, Artificial Sequence
  Description of Artificial Sequence: Synthetic oligonucleotide
ctgctgctctcagaagac

SEQ ID NO: 365 - DNA, 18 bp, Artificial Sequence
  Description of Artificial Sequence: Synthetic oligonucleotide
tgctgctgctgctctcag

SEQ ID NO: 366 - DNA, 18 bp, Artificial Sequence
  Description of Artificial Sequence: Synthetic oligonucleotide
actgctgctgctgctgct

SEQ ID NO: 367 - DNA, 18 bp, Artificial Sequence
  Description of Artificial Sequence: Synthetic oligonucleotide
ctctcactgctgctgctg

SEQ ID NO: 368 - DNA, 18 bp, Artificial Sequence
  Description of Artificial Sequence: Synthetic oligonucleotide
cctcactctcactgctgc

SEQ ID NO: 369 - DNA, 18 bp, Artificial Sequence
  Description of Artificial Sequence: Synthetic oligonucleotide
ttcctcctcactctcact

SEQ ID NO: 370 - DNA, 18 bp, Artificial Sequence
  Description of Artificial Sequence: Synthetic oligonucleotide
acgtcttcctcctcactc

SEQ ID NO: 371 - DNA, 18 bp, Artificial Sequence
  Description of Artificial Sequence: Synthetic oligonucleotide
ctcccacgtcttcctcct

SEQ ID NO: 372 - DNA, 18 bp, Artificial Sequence
  Description of Artificial Sequence: Synthetic oligonucleotide
gtactctcccacgtcttc

SEQ ID NO: 373 - DNA, 18 bp, Artificial Sequence
  Description of Artificial Sequence: Synthetic oligonucleotide
ggacggtactctcccacg

SEQ ID NO: 374 - DNA, 18 bp, Artificial Sequence
  Description of Artificial Sequence: Synthetic oligonucleotide
ggtggggacggtactctc

SEQ ID NO: 375 - DNA, 18 bp, Artificial Sequence
  Description of Artificial Sequence: Synthetic oligonucleotide
tcggtggtggggacggta

SEQ ID NO: 376 - DNA, 18 bp, Artificial Sequence
  Description of Artificial Sequence: Synthetic oligonucleotide
gtcactcggtggtgggga

SEQ ID NO: 377 - DNA, 18 bp, Artificial Sequence
  Description of Artificial Sequence: Synthetic oligonucleotide
cctcggtcactcggtggt

SEQ ID NO: 378 - DNA, 18 bp, Artificial Sequence
  Description of Artificial Sequence: Synthetic oligonucleotide
ggtgccctcggtcactcg

SEQ ID NO: 379 - DNA, 18 bp, Artificial Sequence
  Description of Artificial Sequence: Synthetic oligonucleotide
ctgatggtgccctcggtc

SEQ ID NO: 380 - DNA, 18 bp, Artificial Sequence
  Description of Artificial Sequence: Synthetic oligonucleotide
cctccctgatggtgccct

SEQ ID NO: 381 - DNA, 18 bp, Artificial Sequence
  Description of Artificial Sequence: Synthetic oligonucleotide
ctgttcctccctgatggt

SEQ ID NO: 382 - DNA, 18 bp, Artificial Sequence
  Description of Artificial Sequence: Synthetic oligonucleotide
tactcctgttcctccctg

SEQ ID NO: 383 - DNA, 18 bp, Artificial Sequence
  Description of Artificial Sequence: Synthetic oligonucleotide
cttcatactcctgttcct

SEQ ID NO: 384 - DNA, 18 bp, Artificial Sequence
  Description of Artificial Sequence: Synthetic oligonucleotide
ctcttcttcatactcctg

SEQ ID NO: 385 - DNA, 18 bp, Artificial Sequence
  Description of Artificial Sequence: Synthetic oligonucleotide
tccacctcttcttcatac

SEQ ID NO: 386 - DNA, 18 bp, Artificial Sequence
  Description of Artificial Sequence: Synthetic oligonucleotide
cttcctccacctcttctt

SEQ ID NO: 387 - DNA, 18 bp, Artificial Sequence
  Description of Artificial Sequence: Synthetic oligonucleotide
gggttcttcctccacctc

SEQ ID NO: 388 - DNA, 18 bp, Artificial Sequence
  Description of Artificial Sequence: Synthetic oligonucleotide
gggcggggttcttcctcc

SEQ ID NO: 389 - DNA, 18 bp, Artificial Sequence
  Description of Artificial Sequence: Synthetic oligonucleotide
ctgccgggcggggttctt

SEQ ID NO: 390 - DNA, 18 bp, Artificial Sequence
  Description of Artificial Sequence: Synthetic oligonucleotide
cttggctgccgggcgggg

SEQ ID NO: 391 - DNA, 18 bp, Artificial Sequence
  Description of Artificial Sequence: Synthetic oligonucleotide
actaccttggctgccggg

SEQ ID NO: 392 - DNA, 18 bp, Artificial Sequence
  Description of Artificial Sequence: Synthetic oligonucleotide
tctctactaccttggctg

SEQ ID NO: 393 - DNA, 18 bp, Artificial Sequence
  Description of Artificial Sequence: Synthetic oligonucleotide
ctccctctctactacctt

SEQ ID NO: 394 - DNA, 18 bp, Artificial Sequence
  Description of Artificial Sequence: Synthetic oligonucleotide
gcttcctccctctctact

SEQ ID NO: 395 - DNA, 18 bp, Artificial Sequence
  Description of Artificial Sequence: Synthetic oligonucleotide
gcactgcttcctccctct

SEQ ID NO: 396 - DNA, 18 bp, Artificial Sequence
  Description of Artificial Sequence: Synthetic oligonucleotide
ttcgggcactgcttcctc

SEQ ID NO: 397 - DNA, 18 bp, Artificial Sequence
  Description of Artificial Sequence: Synthetic oligonucleotide
ctggcttcgggcactgct

SEQ ID NO: 398 - DNA, 18 bp, Artificial Sequence
  Description of Artificial Sequence: Synthetic oligonucleotide
ctgggctggcttcgggca

SEQ ID NO: 399 - DNA, 18 bp, Artificial Sequence
  Description of Artificial Sequence: Synthetic oligonucleotide
tgtgactgggctggcttc

SEQ ID NO: 400 - DNA, 18 bp, Artificial Sequence
  Description of Artificial Sequence: Synthetic oligonucleotide
gcttgtgtgactgggctg

SEQ ID NO: 401 - DNA, 18 bp, Artificial Sequence
  Description of Artificial Sequence: Synthetic oligonucleotide
cacctgcttgtgtgactg

SEQ ID NO: 402 - DNA, 18 bp, Artificial Sequence
  Description of Artificial Sequence: Synthetic oligonucleotide
actggcacctgcttgtgt

SEQ ID NO: 403 - DNA, 18 bp, Artificial Sequence
  Description of Artificial Sequence: Synthetic oligonucleotide
attacactggcacctgct

SEQ ID NO: 404 - DNA, 18 bp, Artificial Sequence
  Description of Artificial Sequence: Synthetic oligonucleotide
ctgtgattacactggcac

SEQ ID NO: 405 - DNA, 18 bp, Artificial Sequence
  Description of Artificial Sequence: Synthetic oligonucleotide
ttctactgtgattacact

SEQ ID NO: 406 - DNA, 18 bp, Artificial Sequence
  Description of Artificial Sequence: Synthetic oligonucleotide
actgtttctactgtgatt

SEQ ID NO: 407 - DNA, 18 bp, Artificial Sequence
  Description of Artificial Sequence: Synthetic oligonucleotide
agaggctccatgttggag

SEQ ID NO: 408 - DNA, 18 bp, Artificial Sequence
  Description of Artificial Sequence: Synthetic oligonucleotide
ctgcaagaggctccatgt

SEQ ID NO: 409 - DNA, 18 bp, Artificial Sequence
  Description of Artificial Sequence: Synthetic oligonucleotide
gtaagctgcaagaggctc

SEQ ID NO: 410 - DNA, 18 bp, Artificial Sequence
  Description of Artificial Sequence: Synthetic oligonucleotide
agcgggtaagctgcaaga

SEQ ID NO: 411 - DNA, 18 bp, Artificial Sequence
  Description of Artificial Sequence: Synthetic oligonucleotide
attttagcgggtaagctg

SEQ ID NO: 412 - DNA, 18 bp, Artificial Sequence
  Description of Artificial Sequence: Synthetic oligonucleotide
ggaacattttagcgggta

SEQ ID NO: 413 - DNA, 18 bp, Artificial Sequence
  Description of Artificial Sequence: Synthetic oligonucleotide
ggcccggaacattttagc

SEQ ID NO: 414 - DNA, 18 bp, Artificial Sequence
  Description of Artificial Sequence: Synthetic oligonucleotide
ctctgggcccggaacatt

SEQ ID NO: 415 - DNA, 18 bp, Artificial Sequence
  Description of Artificial Sequence: Synthetic oligonucleotide
ctttgctctgggcccgga

SEQ ID NO: 416 - DNA, 18 bp, Artificial Sequence
  Description of Artificial Sequence: Synthetic oligonucleotide
aatacctttgctctgggc

SEQ ID NO: 417 - DNA, 18 bp, Artificial Sequence
  Description of Artificial Sequence: Synthetic oligonucleotide
ctgcaaatacctttgctc

SEQ ID NO: 418 - DNA, 18 bp, Artificial Sequence
  Description of Artificial Sequence: Synthetic oligonucleotide
caaaactgcaaatacctt

SEQ ID NO: 419 - DNA, 18 bp, Artificial Sequence
  Description of Artificial Sequence: Synthetic oligonucleotide
cagcaaaactgcaaatac

SEQ ID NO: 420 - DNA, 18 bp, Artificial Sequence
  Description of Artificial Sequence: Synthetic oligonucleotide
atagacagcaaaactgca

SEQ ID NO: 421 - DNA, 18 bp, Artificial Sequence
  Description of Artificial Sequence: Synthetic oligonucleotide
gaactatagacagcaaaa

SEQ ID NO: 422 - DNA, 18 bp, Artificial Sequence
  Description of Artificial Sequence: Synthetic oligonucleotide
gcatagaactatagacag

SEQ ID NO: 423 - DNA, 18 bp, Artificial Sequence
  Description of Artificial Sequence: Synthetic oligonucleotide
actgtgcatagaactata

SEQ ID NO: 424 - DNA, 18 bp, Artificial Sequence
  Description of Artificial Sequence: Synthetic oligonucleotide
gcgttactgtgcatagaa

SEQ ID NO: 425 - DNA, 18 bp, Artificial Sequence
  Description of Artificial Sequence: Synthetic oligonucleotide
aaatagcgttactgtgca

SEQ ID NO: 426 - DNA, 18 bp, Artificial Sequence
  Description of Artificial Sequence: Synthetic oligonucleotide
agaagaaatagcgttact

SEQ ID NO: 427 - DNA, 18 bp, Artificial Sequence
  Description of Artificial Sequence: Synthetic oligonucleotide
ttagttgtagaagaaata

SEQ ID NO: 428 - DNA, 18 bp, Artificial Sequence
  Description of Artificial Sequence: Synthetic oligonucleotide
gaattttagttgtagaag

SEQ ID NO: 429 - DNA, 18 bp, Artificial Sequence
  Description of Artificial Sequence: Synthetic oligonucleotide
ttgaggaattttagttgt

SEQ ID NO: 430 - DNA, 18 bp, Artificial Sequence
  Description of Artificial Sequence: Synthetic oligonucleotide
taggtttgaggaatttta

SEQ ID NO: 431 - DNA, 18 bp, Artificial Sequence
  Description of Artificial Sequence: Synthetic oligonucleotide
gattttaggtttgaggaa

SEQ ID NO: 432 - DNA, 18 bp, Artificial Sequence
  Description of Artificial Sequence: Synthetic oligonucleotide
ctgttgattttaggtttg

SEQ ID NO: 433 - DNA, 18 bp, Artificial Sequence
  Description of Artificial Sequence: Synthetic oligonucleotide
aagctgttgattttaggt

SEQ ID NO: 434 - DNA, 18 bp, Artificial Sequence
  Description of Artificial Sequence: Synthetic oligonucleotide
cataaaagctgttgattt

SEQ ID NO: 435 - DNA, 18 bp, Artificial Sequence
  Description of Artificial Sequence: Synthetic oligonucleotide
aaaggcataaaagctgtt

SEQ ID NO: 436 - DNA, 18 bp, Artificial Sequence
  Description of Artificial Sequence: Synthetic oligonucleotide
acttcaaaggcataaaag

SEQ ID NO: 437 - DNA, 18 bp, Artificial Sequence
  Description of Artificial Sequence: Synthetic oligonucleotide
ccttcacttcaaaggcat

SEQ ID NO: 438 - DNA, 18 bp, Artificial Sequence
  Description of Artificial Sequence: Synthetic oligonucleotide
tgcatccttcacttcaaa

SEQ ID NO: 439 - DNA, 18 bp, Artificial Sequence
  Description of Artificial Sequence: Synthetic oligonucleotide
ccttttgcatccttcact

SEQ ID NO: 440 - DNA, 18 bp, Artificial Sequence
  Description of Artificial Sequence: Synthetic oligonucleotide
ttcttccttttgcatcct

SEQ ID NO: 441 - DNA, 18 bp, Artificial Sequence
  Description of Artificial Sequence: Synthetic oligonucleotide
aacagttcttccttttgc

SEQ ID NO: 442 - DNA, 18 bp, Artificial Sequence
  Description of Artificial Sequence: Synthetic oligonucleotide
agagaaacagttcttcct

SEQ ID NO: 443 - DNA, 18 bp, Artificial Sequence
  Description of Artificial Sequence: Synthetic oligonucleotide
tttccagagaaacagttc

SEQ ID NO: 444 - DNA, 18 bp, Artificial Sequence
  Description of Artificial Sequence: Synthetic oligonucleotide
tggttcccagtttgtaat

SEQ ID NO: 445 - DNA, 18 bp, Artificial Sequence
  Description of Artificial Sequence: Synthetic oligonucleotide
cagggtggttcccagttt

SEQ ID NO: 446 - DNA, 18 bp, Artificial Sequence
  Description of Artificial Sequence: Synthetic oligonucleotide
agttccagggtggttccc

SEQ ID NO: 447 - DNA, 18 bp, Artificial Sequence
  Description of Artificial Sequence: Synthetic oligonucleotide
gagtgagttccagggtgg

SEQ ID NO: 448 - DNA, 18 bp, Artificial Sequence
  Description of Artificial Sequence: Synthetic oligonucleotide
cagtggagtgagttccag

SEQ ID NO: 449 - DNA, 18 bp, Artificial Sequence
  Description of Artificial Sequence: Synthetic oligonucleotide
ttcctcagtggagtgagt

SEQ ID NO: 450 - DNA, 18 bp, Artificial Sequence
  Description of Artificial Sequence: Synthetic oligonucleotide
tcctcttcctcagtggag

SEQ ID NO: 451 - DNA, 18 bp, Artificial Sequence
  Description of Artificial Sequence: Synthetic oligonucleotide
tttcctcctcttcctcag

SEQ ID NO: 452 - DNA, 18 bp, Artificial Sequence
  Description of Artificial Sequence: Synthetic oligonucleotide
ttctctttcctcctcttc

SEQ ID NO: 453 - DNA, 18 bp, Artificial Sequence
  Description of Artificial Sequence: Synthetic oligonucleotide
ggctcttctctttcctcc

SEQ ID NO: 454 - DNA, 18 bp, Artificial Sequence
  Description of Artificial Sequence: Synthetic oligonucleotide
cccaaggctcttctcttt

SEQ ID NO: 455 - DNA, 18 bp, Artificial Sequence
  Description of Artificial Sequence: Synthetic oligonucleotide
tcgtccccaaggctcttc

SEQ ID NO: 456 - DNA, 18 bp, Artificial Sequence
  Description of Artificial Sequence: Synthetic oligonucleotide
cttcctcgtccccaaggc

SEQ ID NO: 457 - DNA, 18 bp, Artificial Sequence
  Description of Artificial Sequence: Synthetic oligonucleotide
tggctcttcctcgtcccc

SEQ ID NO: 458 - DNA, 18 bp, Artificial Sequence
  Description of Artificial Sequence: Synthetic oligonucleotide
gcaggtggctcttcctcg

SEQ ID NO: 459 - DNA, 18 bp, Artificial Sequence
  Description of Artificial Sequence: Synthetic oligonucleotide
caaaggcaggtggctctt

SEQ ID NO: 460 - DNA, 18 bp, Artificial Sequence
  Description of Artificial Sequence: Synthetic oligonucleotide
ggactcaaaggcaggtgg

SEQ ID NO: 461 - DNA, 18 bp, Artificial Sequence
  Description of Artificial Sequence: Synthetic oligonucleotide
tttgtggactcaaaggca

SEQ ID NO: 462 - DNA, 18 bp, Artificial Sequence
  Description of Artificial Sequence: Synthetic oligonucleotide
gactttttgtggactcaa

SEQ ID NO: 463 - DNA, 18 bp, Artificial Sequence
  Description of Artificial Sequence: Synthetic oligonucleotide
aaactgactttttgtgga

SEQ ID NO: 464 - DNA, 18 bp, Artificial Sequence
  Description of Artificial Sequence: Synthetic oligonucleotide
ctgccaaactgacttttt

SEQ ID NO: 465 - DNA, 18 bp, Artificial Sequence
  Description of Artificial Sequence: Synthetic oligonucleotide
cggggctgccaaactgac

SEQ ID NO: 466 - DNA, 18 bp, Artificial Sequence
  Description of Artificial Sequence: Synthetic oligonucleotide
tggcccggggctgccaaa

SEQ ID NO: 467 - DNA, 18 bp, Artificial Sequence
  Description of Artificial Sequence: Synthetic oligonucleotide
tcagatggcccggggctg

SEQ ID NO: 468 - DNA, 18 bp, Artificial Sequence
  Description of Artificial Sequence: Synthetic oligonucleotide
cagcatcagatggcccgg

SEQ ID NO: 469 - DNA, 18 bp, Artificial Sequence
  Description of Artificial Sequence: Synthetic oligonucleotide
ccgagcagcatcagatgg

SEQ ID NO: 470 - DNA, 18 bp, Artificial Sequence
  Description of Artificial Sequence: Synthetic oligonucleotide
aggttccgagcagcatca

SEQ ID NO: 471 - DNA, 18 bp, Artificial Sequence
  Description of Artificial Sequence: Synthetic oligonucleotide
ggggaaggttccgagcag

SEQ ID NO: 472 - DNA, 18 bp, Artificial Sequence
  Description of Artificial Sequence: Synthetic oligonucleotide
ctccaggggaaggttccg

SEQ ID NO: 473 - DNA, 18 bp, Artificial Sequence
  Description of Artificial Sequence: Synthetic oligonucleotide
gtggactccaggggaagg

SEQ ID NO: 474 - DNA, 18 bp, Artificial Sequence
  Description of Artificial Sequence: Synthetic oligonucleotide
acttggtggactccaggg

SEQ ID NO: 475 - DNA, 18 bp, Artificial Sequence
  Description of Artificial Sequence: Synthetic oligonucleotide
tggtgacttggtggactc

SEQ ID NO: 476 - DNA, 18 bp, Artificial Sequence
  Description of Artificial Sequence: Synthetic oligonucleotide
tctgctggtgacttggtg

SEQ ID NO: 477 - DNA, 18 bp, Artificial Sequence
  Description of Artificial Sequence: Synthetic oligonucleotide
ttggttctgctggtgact

SEQ ID NO: 478 - DNA, 18 bp, Artificial Sequence
  Description of Artificial Sequence: Synthetic oligonucleotide
tttacttggttctgctgg

SEQ ID NO: 479 - DNA, 18 bp, Artificial Sequence
  Description of Artificial Sequence: Synthetic oligonucleotide
actgatttacttggttct

SEQ ID NO: 480 - DNA, 18 bp, Artificial Sequence
  Description of Artificial Sequence: Synthetic oligonucleotide
agggcactgatttacttg

SEQ ID NO: 481 - DNA, 18 bp, Artificial Sequence
  Description of Artificial Sequence: Synthetic oligonucleotide
caaggagggcactgattt

SEQ ID NO: 482 - DNA, 18 bp, Artificial Sequence
  Description of Artificial Sequence: Synthetic oligonucleotide
ccctccaaggagggcact

SEQ ID NO: 483 - DNA, 18 bp, Artificial Sequence
  Description of Artificial Sequence: Synthetic oligonucleotide
tgggtccctccaaggagg

SEQ ID NO: 484 - DNA, 18 bp, Artificial Sequence
  Description of Artificial Sequence: Synthetic oligonucleotide
gcccgtgggtccctccaa

SEQ ID NO: 485 - DNA, 18 bp, Artificial Sequence
  Description of Artificial Sequence: Synthetic oligonucleotide
tggaagcccgtgggtccc

SEQ ID NO: 486 - DNA, 18 bp, Artificial Sequence
  Description of Artificial Sequence: Synthetic oligonucleotide
ttggctggaagcccgtgg

SEQ ID NO: 487 - DNA, 18 bp, Artificial Sequence
  Description of Artificial Sequence: Synthetic oligonucleotide
agtccttggctggaagcc

SEQ ID NO: 488 - DNA, 18 bp, Artificial Sequence
  Description of Artificial Sequence: Synthetic oligonucleotide
ttgggagtccttggctgg

SEQ ID NO: 489 - DNA, 18 bp, Artificial Sequence
  Description of Artificial Sequence: Synthetic oligonucleotide
ctggcttgggagtccttg

SEQ ID NO: 490 - DNA, 18 bp, Artificial Sequence
  Description of Artificial Sequence: Synthetic oligonucleotide
ggaccctggcttgggagt

SEQ ID NO: 491 - DNA, 18 bp, Artificial Sequence
  Description of Artificial Sequence: Synthetic oligonucleotide
gaaccggaccctggcttg

SEQ ID NO: 492 - DNA, 18 bp, Artificial Sequence
  Description of Artificial Sequence: Synthetic oligonucleotide
attctgaaccggaccctg

SEQ ID NO: 493 - DNA, 18 bp, Artificial Sequence
  Description of Artificial Sequence: Synthetic oligonucleotide
ccctgattctgaaccgga

SEQ ID NO: 494 - DNA, 18 bp, Artificial Sequence
  Description of Artificial Sequence: Synthetic oligonucleotide
tccttccctgattctgaa

SEQ ID NO: 495 - DNA, 18 bp, Artificial Sequence
  Description of Artificial Sequence: Synthetic oligonucleotide
tcctctccttccctgatt

SEQ ID NO: 496 - DNA, 18 bp, Artificial Sequence
  Description of Artificial Sequence: Synthetic oligonucleotide
tgttctcctctccttccc

SEQ ID NO: 497 - DNA, 18 bp, Artificial Sequence
  Description of Artificial Sequence: Synthetic oligonucleotide
gacgttgttctcctctcc

SEQ ID NO: 498 - DNA, 18 bp, Artificial Sequence
  Description of Artificial Sequence: Synthetic oligonucleotide
ctttggacgttgttctcc

SEQ ID NO: 499 - DNA, 18 bp, Artificial Sequence
  Description of Artificial Sequence: Synthetic oligonucleotide
aatttctttggacgttgt

SEQ ID NO: 500 - DNA, 18 bp, Artificial Sequence
  Description of Artificial Sequence: Synthetic oligonucleotide
acagaaatttctttggac

SEQ ID NO: 501 - DNA, 18 bp, Artificial Sequence
  Description of Artificial Sequence: Synthetic oligonucleotide
ggatgacagaaatttctt

SEQ ID NO: 502 - DNA, 18 bp, Artificial Sequence
  Description of Artificial Sequence: Synthetic oligonucleotide
gtgctggatgacagaaat

SEQ ID NO: 503 - DNA, 18 bp, Artificial Sequence
  Description of Artificial Sequence: Synthetic oligonucleotide
ctggtgtgctggatgaca

SEQ ID NO: 504 - DNA, 18 bp, Artificial Sequence
  Description of Artificial Sequence: Synthetic oligonucleotide
aggagctggtgtgctgga

SEQ ID NO: 505 - DNA, 18 bp, Artificial Sequence
  Description of Artificial Sequence: Synthetic oligonucleotide
ctcaaaggagctggtgtg

SEQ ID NO: 506 - DNA, 18 bp, Artificial Sequence
  Description of Artificial Sequence: Synthetic oligonucleotide
gatttctcaaaggagctg

SEQ ID NO: 507 - DNA, 18 bp, Artificial Sequence
  Description of Artificial Sequence: Synthetic oligonucleotide
aatcagatttctcaaagg

SEQ ID NO: 508 - DNA, 18 bp, Artificial Sequence
  Description of Artificial Sequence: Synthetic oligonucleotide
gagagaatcagatttctc

SEQ ID NO: 509 - DNA, 18 bp, Artificial Sequence
  Description of Artificial Sequence: Synthetic oligonucleotide
tgctcgagagaatcagat

SEQ ID NO: 510 - DNA, 18 bp, Artificial Sequence
  Description of Artificial Sequence: Synthetic oligonucleotide
tcggctgctcgagagaat

SEQ ID NO: 511 - DNA, 18 bp, Artificial Sequence
  Description of Artificial Sequence: Synthetic oligonucleotide
gccactcggctgctcgag

SEQ ID NO: 512 - DNA, 18 bp, Artificial Sequence
  Description of Artificial Sequence: Synthetic oligonucleotide
tccaagccactcggctgc

SEQ ID NO: 513 - DNA, 18 bp, Artificial Sequence
  Description of Artificial Sequence: Synthetic oligonucleotide
ccccttccaagccactcg

SEQ ID NO: 514 - DNA, 18 bp, Artificial Sequence
  Description of Artificial Sequence: Synthetic oligonucleotide
gtcttccccttccaagcc

SEQ ID NO: 515 - DNA, 18 bp, Artificial Sequence
  Description of Artificial Sequence: Synthetic oligonucleotide
ggtttgtcttccccttcc

SEQ ID NO: 516 - DNA, 18 bp, Artificial Sequence
  Description of Artificial Sequence: Synthetic oligonucleotide
ccagaggtttgtcttccc

SEQ ID NO: 517 - DNA, 18 bp, Artificial Sequence
  Description of Artificial Sequence: Synthetic oligonucleotide
ctgggccagaggtttgtc

SEQ ID NO: 518 - DNA, 18 bp, Artificial Sequence
  Description of Artificial Sequence: Synthetic oligonucleotide
gggaactgggccagaggt

SEQ ID NO: 519 - DNA, 18 bp, Artificial Sequence
  Description of Artificial Sequence: Synthetic oligonucleotide
gtgatgggaactgggcca

SEQ ID NO: 520 - DNA, 18 bp, Artificial Sequence
  Description of Artificial Sequence: Synthetic oligonucleotide
tgggggtgatgggaactg

SEQ ID NO: 521 - DNA, 18 bp, Artificial Sequence
  Description of Artificial Sequence: Synthetic oligonucleotide
gcaggtgggggtgatggg

SEQ ID NO: 522 - DNA, 18 bp, Artificial Sequence
  Description of Artificial Sequence: Synthetic oligonucleotide
gtggggcaggtgggggtg

SEQ ID NO: 523 - DNA, 18 bp, Artificial Sequence
  Description of Artificial Sequence: Synthetic oligonucleotide
tccgtgtggggcaggtgg

SEQ ID NO: 524 - DNA, 18 bp, Artificial Sequence
  Description of Artificial Sequence: Synthetic oligonucleotide
gagcgtccgtgtggggca

SEQ ID NO: 525 - DNA, 18 bp, Artificial Sequence
  Description of Artificial Sequence: Synthetic oligonucleotide
gagcagagcgtccgtgtg

SEQ ID NO: 526 - DNA, 18 bp, Artificial Sequence
  Description of Artificial Sequence: Synthetic oligonucleotide
ggagtgagcagagcgtcc

SEQ ID NO: 527 - DNA, 18 bp, Artificial Sequence
  Description of Artificial Sequence: Synthetic oligonucleotide
tgcagggagtgagcagag

SEQ ID NO: 528 - DNA, 18 bp, Artificial Sequence
  Description of Artificial Sequence: Synthetic oligonucleotide
taggctgcagggagtgag

SEQ ID NO: 529 - DNA, 18 bp, Artificial Sequence
  Description of Artificial Sequence: Synthetic oligonucleotide
caacttaggctgcaggga

SEQ ID NO: 530 - DNA, 18 bp, Artificial Sequence
  Description of Artificial Sequence: Synthetic oligonucleotide
cggaccaacttaggctgc

SEQ ID NO: 531 - DNA, 18 bp, Artificial Sequence
  Description of Artificial Sequence: Synthetic oligonucleotide
gctggcggaccaacttag

SEQ ID NO: 532 - DNA, 18 bp, Artificial Sequence
  Description of Artificial Sequence: Synthetic oligonucleotide
gttgggctggcggaccaa

SEQ ID NO: 533 - DNA, 18 bp, Artificial Sequence
  Description of Artificial Sequence: Synthetic oligonucleotide
tgaatgttgggctggcgg

SEQ ID NO: 534 - DNA, 18 bp, Artificial Sequence
  Description of Artificial Sequence: Synthetic oligonucleotide
gaacctgaatgttgggct

SEQ ID NO: 535 - DNA, 18 bp, Artificial Sequence
  Description of Artificial Sequence: Synthetic oligonucleotide
ctcaggaacctgaatgtt

SEQ ID NO: 536 - DNA, 18 bp, Artificial Sequence
  Description of Artificial Sequence: Synthetic oligonucleotide
aggatctcaggaacctga

SEQ ID NO: 537 - DNA, 18 bp, Artificial Sequence
  Description of Artificial Sequence: Synthetic oligonucleotide
ttactaggatctcaggaa

SEQ ID NO: 538 - DNA, 18 bp, Artificial Sequence
  Description of Artificial Sequence: Synthetic oligonucleotide
ctcagttactaggatctc

SEQ ID NO: 539 - DNA, 18 bp, Artificial Sequence
  Description of Artificial Sequence: Synthetic oligonucleotide
ggctcctcagttactagg

SEQ ID NO: 540 - DNA, 18 bp, Artificial Sequence
  Description of Artificial Sequence: Synthetic oligonucleotide
ggtcaggctcctcagtta

SEQ ID NO: 541 - DNA, 18 bp, Artificial Sequence
  Description of Artificial Sequence: Synthetic oligonucleotide
cggccggtcaggctcctc

SEQ ID NO: 542 - DNA, 18 bp, Artificial Sequence
  Description of Artificial Sequence: Synthetic oligonucleotide
gtgtccggccggtcaggc

SEQ ID NO: 543 - DNA, 18 bp, Artificial Sequence
  Description of Artificial Sequence: Synthetic oligonucleotide
gctctgtgtccggccggt

SEQ ID NO: 544 - DNA, 18 bp, Artificial Sequence
  Description of Artificial Sequence: Synthetic oligonucleotide
ctctggctctgtgtccgg

SEQ ID NO: 545 - DNA, 18 bp, Artificial Sequence
  Description of Artificial Sequence: Synthetic oligonucleotide
ggcggctctggctctgtg

SEQ ID NO: 546 - DNA, 18 bp, Artificial Sequence
  Description of Artificial Sequence: Synthetic oligonucleotide
tagggggcggctctggct

SEQ ID NO: 547 - DNA, 18 bp, Artificial Sequence
  Description of Artificial Sequence: Synthetic oligonucleotide
ttccttagggggcggctc

SEQ ID NO: 548 - DNA, 18 bp, Artificial Sequence
  Description of Artificial Sequence: Synthetic oligonucleotide
tcaggttccttagggggc

SEQ ID NO: 549 - DNA, 18 bp, Artificial Sequence
  Description of Artificial Sequence: Synthetic oligonucleotide
tcttctcaggttccttag

SEQ ID NO: 550 - DNA, 18 bp, Artificial Sequence
  Description of Artificial Sequence: Synthetic oligonucleotide
ctcagtcttctcaggttc

SEQ ID NO: 551 - DNA, 18 bp, Artificial Sequence
  Description of Artificial Sequence: Synthetic oligonucleotide
aactcctcagtcttctca

SEQ ID NO: 552 - DNA, 18 bp, Artificial Sequence
  Description of Artificial Sequence: Synthetic oligonucleotide
attggaactcctcagtct

SEQ ID NO: 553 - DNA, 18 bp, Artificial Sequence
  Description of Artificial Sequence: Synthetic oligonucleotide
gggccattggaactcctc

SEQ ID NO: 554 - DNA, 18 bp, Artificial Sequence
  Description of Artificial Sequence: Synthetic oligonucleotide
cgctggggccattggaac

SEQ ID NO: 555 - DNA, 18 bp, Artificial Sequence
  Description of Artificial Sequence: Synthetic oligonucleotide
ggctgcgctggggccatt

SEQ ID NO: 556 - DNA, 18 bp, Artificial Sequence
  Description of Artificial Sequence: Synthetic oligonucleotide
tgtctggctgcgctgggg

SEQ ID NO: 557 - DNA, 18 bp, Artificial Sequence
  Description of Artificial Sequence: Synthetic oligonucleotide
gcaagtgtctggctgcgc

SEQ ID NO: 558 - DNA, 18 bp, Artificial Sequence
  Description of Artificial Sequence: Synthetic oligonucleotide
gctgggcaagtgtctggc

SEQ ID NO: 559 - DNA, 18 bp, Artificial Sequence
  Description of Artificial Sequence: Synthetic oligonucleotide
tgggagctgggcaagtgt

SEQ ID NO: 560 - DNA, 18 bp, Artificial Sequence
  Description of Artificial Sequence: Synthetic oligonucleotide
tcagctgggagctgggca

SEQ ID NO: 561 - DNA, 18 bp, Artificial Sequence
  Description of Artificial Sequence: Synthetic oligonucleotide
gcttctcagctgggagct

SEQ ID NO: 562 - DNA, 18 bp, Artificial Sequence
  Description of Artificial Sequence: Synthetic oligonucleotide
tggcagcttctcagctgg

SEQ ID NO: 563 - DNA, 18 bp, Artificial Sequence
  Description of Artificial Sequence: Synthetic oligonucleotide
ttgggtggcagcttctca

SEQ ID NO: 564 - DNA, 18 bp, Artificial Sequence
  Description of Artificial Sequence: Synthetic oligonucleotide
tctttttgggtggcagct

SEQ ID NO: 565 - DNA, 18 bp, Artificial Sequence
  Description of Artificial Sequence: Synthetic oligonucleotide
cctcttctttttgggtgg

SEQ ID NO: 566 - DNA, 18 bp, Artificial Sequence
  Description of Artificial Sequence: Synthetic oligonucleotide
cgcaacctcttctttttg

SEQ ID NO: 567 - DNA, 18 bp, Artificial Sequence
  Description of Artificial Sequence: Synthetic oligonucleotide
ccaggcgcaacctcttct

SEQ ID NO: 568 - DNA, 18 bp, Artificial Sequence
  Description of Artificial Sequence: Synthetic oligonucleotide
ctctgccaggcgcaacct

SEQ ID NO: 569 - DNA, 18 bp, Artificial Sequence
  Description of Artificial Sequence: Synthetic oligonucleotide
gccatctctgccaggcgc

SEQ ID NO: 570 - DNA, 18 bp, Artificial Sequence
  Description of Artificial Sequence: Synthetic oligonucleotide
attgggccatctctgcca

SEQ ID NO: 571 - DNA, 18 bp, Artificial Sequence
  Description of Artificial Sequence: Synthetic oligonucleotide
tgatgattgggccatctc

SEQ ID NO: 572 - DNA, 18 bp, Artificial Sequence
  Description of Artificial Sequence: Synthetic oligonucleotide
tcccctgatgattgggcc

SEQ ID NO: 573 - DNA, 18 bp, Artificial Sequence
  Description of Artificial Sequence: Synthetic oligonucleotide
tggactcccctgatgatt

SEQ ID NO: 574 - DNA, 18 bp, Artificial Sequence
  Description of Artificial Sequence: Synthetic oligonucleotide
gaagctggactcccctga

SEQ ID NO: 575 - DNA, 18 bp, Artificial Sequence
  Description of Artificial Sequence: Synthetic oligonucleotide
gactcgaagctggactcc

SEQ ID NO: 576 - DNA, 18 bp, Artificial Sequence
  Description of Artificial Sequence: Synthetic oligonucleotide
cagaggactcgaagctgg

SEQ ID NO: 577 - DNA, 18 bp, Artificial Sequence
  Description of Artificial Sequence: Synthetic oligonucleotide
aggcacagaggactcgaa

SEQ ID NO: 578 - DNA, 18 bp, Artificial Sequence
  Description of Artificial Sequence: Synthetic oligonucleotide
gacagaggcacagaggac

SEQ ID NO: 579 - DNA, 18 bp, Artificial Sequence
  Description of Artificial Sequence: Synthetic oligonucleotide
tgcgagacagaggcacag

SEQ ID NO: 580 - DNA, 18 bp, Artificial Sequence
  Description of Artificial Sequence: Synthetic oligonucleotide
cgggctgcgagacagagg

SEQ ID NO: 581 - DNA, 18 bp, Artificial Sequence
  Description of Artificial Sequence: Synthetic oligonucleotide
tggctcgggctgcgagac

SEQ ID NO: 582 - DNA, 18 bp, Artificial Sequence
  Description of Artificial Sequence: Synthetic oligonucleotide
tttcctggctcgggctgc

SEQ ID NO: 583 - DNA, 18 bp, Artificial Sequence
  Description of Artificial Sequence: Synthetic oligonucleotide
attgctttcctggctcgg

SEQ ID NO: 584 - DNA, 18 bp, Artificial Sequence
  Description of Artificial Sequence: Synthetic oligonucleotide
gagacattgctttcctgg

SEQ ID NO: 585 - DNA, 18 bp, Artificial Sequence
  Description of Artificial Sequence: Synthetic oligonucleotide
tcaaagagacattgcttt

SEQ ID NO: 586 - DNA, 18 bp, Artificial Sequence
  Description of Artificial Sequence: Synthetic oligonucleotide
cccactcaaagagacatt

SEQ ID NO: 587 - DNA, 18 bp, Artificial Sequence
  Description of Artificial Sequence: Synthetic oligonucleotide
ctggacccactcaaagag

SEQ ID NO: 588 - DNA, 18 bp, Artificial Sequence
  Description of Artificial Sequence: Synthetic oligonucleotide
agcggctggacccactca

SEQ ID NO: 589 - DNA, 18 bp, Artificial Sequence
  Description of Artificial Sequence: Synthetic oligonucleotide
ggctgagcggctggaccc

SEQ ID NO: 590 - DNA, 18 bp, Artificial Sequence
  Description of Artificial Sequence: Synthetic oligonucleotide
aacgaggctgagcggctg

SEQ ID NO: 591 - DNA, 18 bp, Artificial Sequence
  Description of Artificial Sequence: Synthetic oligonucleotide
tctcaaacgaggctgagc

SEQ ID NO: 592 - DNA, 18 bp, Artificial Sequence
  Description of Artificial Sequence: Synthetic oligonucleotide
atccctctcaaacgaggc

SEQ ID NO: 593 - DNA, 18 bp, Artificial Sequence
  Description of Artificial Sequence: Synthetic oligonucleotide
tggtcatccctctcaaac

SEQ ID NO: 594 - DNA, 18 bp, Artificial Sequence
  Description of Artificial Sequence: Synthetic oligonucleotide
tcccatggtcatccctct

SEQ ID NO: 595 - DNA, 18 bp, Artificial Sequence
  Description of Artificial Sequence: Synthetic oligonucleotide
ggctttcccatggtcatc

SEQ ID NO: 596 - DNA, 18 bp, Artificial Sequence
  Description of Artificial Sequence: Synthetic oligonucleotide
gcctcggctttcccatgg

SEQ ID NO: 597 - DNA, 18 bp, Artificial Sequence
  Description of Artificial Sequence: Synthetic oligonucleotide
tgggggcctcggctttcc

SEQ ID NO: 598 - DNA, 18 bp, Artificial Sequence
  Description of Artificial Sequence: Synthetic oligonucleotide
gggactgggggcctcggc

SEQ ID NO: 599 - DNA, 18 bp, Artificial Sequence
  Description of Artificial Sequence: Synthetic oligonucleotide
gatgagggactgggggcc

SEQ ID NO: 600 - DNA, 18 bp, Artificial Sequence
  Description of Artificial Sequence: Synthetic oligonucleotide
tgtcagatgagggactgg

SEQ ID NO: 601 - DNA, 18 bp, Artificial Sequence
  Description of Artificial Sequence: Synthetic oligonucleotide
gcgcatgtcagatgaggg

SEQ ID NO: 602 - DNA, 18 bp, Artificial Sequence
  Description of Artificial Sequence: Synthetic oligonucleotide
ttggggcgcatgtcagat

SEQ ID NO: 603 - DNA, 18 bp, Artificial Sequence
  Description of Artificial Sequence: Synthetic oligonucleotide
ggggtttggggcgcatgt

SEQ ID NO: 604 - DNA, 18 bp, Artificial Sequence
  Description of Artificial Sequence: Synthetic oligonucleotide
gcccaggggtttggggcg

SEQ ID NO: 605 - DNA, 18 bp, Artificial Sequence
  Description of Artificial Sequence: Synthetic oligonucleotide
tgggtgcccaggggtttg

SEQ ID NO: 606 - DNA, 18 bp, Artificial Sequence
  Description of Artificial Sequence: Synthetic oligonucleotide
acatgtgggtgcccaggg

SEQ ID NO: 607 - DNA, 18 bp, Artificial Sequence
  Description of Artificial Sequence: Synthetic oligonucleotide
agtcaacatgtgggtgcc

SEQ ID NO: 608 - DNA, 18 bp, Artificial Sequence
  Description of Artificial Sequence: Synthetic oligonucleotide
gggacagtcaacatgtgg

SEQ ID NO: 609 - DNA, 18 bp, Artificial Sequence
  Description of Artificial Sequence: Synthetic oligonucleotide
ggctggggacagtcaaca

SEQ ID NO: 610 - DNA, 18 bp, Artificial Sequence
  Description of Artificial Sequence: Synthetic oligonucleotide
gtggtggctggggacagt

SEQ ID NO: 611 - DNA, 18 bp, Artificial Sequence
  Description of Artificial Sequence: Synthetic oligonucleotide
tgtgggtggtggctgggg

SEQ ID NO: 612 - DNA, 18 bp, Artificial Sequence
  Description of Artificial Sequence: Synthetic oligonucleotide
gggcatgtgggtggtggc

SEQ ID NO: 613 - DNA, 18 bp, Artificial Sequence
  Description of Artificial Sequence: Synthetic oligonucleotide
ctctcgggcatgtgggtg

SEQ ID NO: 614 - DNA, 18 bp, Artificial Sequence
  Description of Artificial Sequence: Synthetic oligonucleotide
cgcatctctcgggcatgt

SEQ ID NO: 615 - DNA, 18 bp, Artificial Sequence
  Description of Artificial Sequence: Synthetic oligonucleotide
acctccgcatctctcggg

SEQ ID NO: 616 - DNA, 18 bp, Artificial Sequence
  Description of Artificial Sequence: Synthetic oligonucleotide
ggctgacctccgcatctc

SEQ ID NO: 617 - DNA, 18 bp, Artificial Sequence
  Description of Artificial Sequence: Synthetic oligonucleotide
tctgaggctgacctccgc

SEQ ID NO: 618 - DNA, 18 bp, Artificial Sequence
  Description of Artificial Sequence: Synthetic oligonucleotide
tctgctctgaggctgacc

SEQ ID NO: 619 - DNA, 18 bp, Artificial Sequence
  Description of Artificial Sequence: Synthetic oligonucleotide
ggggctctgctctgaggc

SEQ ID NO: 620 - DNA, 18 bp, Artificial Sequence
  Description of Artificial Sequence: Synthetic oligonucleotide
acgttggggctctgctct

SEQ ID NO: 621 - DNA, 18 bp, Artificial Sequence
  Description of Artificial Sequence: Synthetic oligonucleotide
gggaaacgttggggctct

SEQ ID NO: 622 - DNA, 18 bp, Artificial Sequence
  Description of Artificial Sequence: Synthetic oligonucleotide
agaatgggaaacgttggg

SEQ ID NO: 623 - DNA, 18 bp, Artificial Sequence
  Description of Artificial Sequence: Synthetic oligonucleotide
tgggcagaatgggaaacg

SEQ ID NO: 624 - DNA, 18 bp, Artificial Sequence
  Description of Artificial Sequence: Synthetic oligonucleotide
tcatgtgggcagaatggg

SEQ ID NO: 625 - DNA, 18 bp, Artificial Sequence
  Description of Artificial Sequence: Synthetic oligonucleotide
ctcggtcatgtgggcaga

SEQ ID NO: 626 - DNA, 18 bp, Artificial Sequence
  Description of Artificial Sequence: Synthetic oligonucleotide
cgtgtctcggtcatgtgg

SEQ ID NO: 627 - DNA, 18 bp, Artificial Sequence
  Description of Artificial Sequence: Synthetic oligonucleotide
tgctgcgtgtctcggtca

SEQ ID NO: 628 - DNA, 18 bp, Artificial Sequence
  Description of Artificial Sequence: Synthetic oligonucleotide
ggatttgctgcgtgtctc

SEQ ID NO: 629 - DNA, 18 bp, Artificial Sequence
  Description of Artificial Sequence: Synthetic oligonucleotide
tcaaaggatttgctgcgt

SEQ ID NO: 630 - DNA, 18 bp, Artificial Sequence
  Description of Artificial Sequence: Synthetic oligonucleotide
catagtcaaaggatttgc

SEQ ID NO: 631 - DNA, 18 bp, Artificial Sequence
  Description of Artificial Sequence: Synthetic oligonucleotide
gctgccatagtcaaagga

SEQ ID NO: 632 - DNA, 18 bp, Artificial Sequence
  Description of Artificial Sequence: Synthetic oligonucleotide
gacaagctgccatagtca

SEQ ID NO: 633 - DNA, 18 bp, Artificial Sequence
  Description of Artificial Sequence: Synthetic oligonucleotide
tcaaggacaagctgccat

SEQ ID NO: 634 - DNA, 18 bp, Artificial Sequence
  Description of Artificial Sequence: Synthetic oligonucleotide
gcctgtcaaggacaagct

SEQ ID NO: 635 - DNA, 18 bp, Artificial Sequence
  Description of Artificial Sequence: Synthetic oligonucleotide
gaagggcctgtcaaggac

SEQ ID NO: 636 - DNA, 18 bp, Artificial Sequence
  Description of Artificial Sequence: Synthetic oligonucleotide
gagcagaagggcctgtca

SEQ ID NO: 637 - DNA, 18 bp, Artificial Sequence
  Description of Artificial Sequence: Synthetic oligonucleotide
ggctggagcagaagggcc

SEQ ID NO: 638 - DNA, 18 bp, Artificial Sequence
  Description of Artificial Sequence: Synthetic oligonucleotide
actggggctggagcagaa

SEQ ID NO: 639 - DNA, 18 bp, Artificial Sequence
  Description of Artificial Sequence: Synthetic oligonucleotide
gagccactggggctggag

SEQ ID NO: 640 - DNA, 18 bp, Artificial Sequence
  Description of Artificial Sequence: Synthetic oligonucleotide
tggtggagccactggggc

SEQ ID NO: 641 - DNA, 18 bp, Artificial Sequence
  Description of Artificial Sequence: Synthetic oligonucleotide
cgcgctggtggagccact

SEQ ID NO: 642 - DNA, 18 bp, Artificial Sequence
  Description of Artificial Sequence: Synthetic oligonucleotide
ccacccgcgctggtggag

SEQ ID NO: 643 - DNA, 18 bp, Artificial Sequence
  Description of Artificial Sequence: Synthetic oligonucleotide
cggggccacccgcgctgg

SEQ ID NO: 644 - DNA, 18 bp, Artificial Sequence
  Description of Artificial Sequence: Synthetic oligonucleotide
tctggcggggccacccgc

SEQ ID NO: 645 - DNA, 18 bp, Artificial Sequence
  Description of Artificial Sequence: Synthetic oligonucleotide
ttctctctggcggggcca

SEQ ID NO: 646 - DNA, 18 bp, Artificial Sequence
  Description of Artificial Sequence: Synthetic oligonucleotide
ttttcttctctctggcgg

SEQ ID NO: 647 - DNA, 18 bp, Artificial Sequence
  Description of Artificial Sequence: Synthetic oligonucleotide
aagcattttcttctctct

SEQ ID NO: 648 - DNA, 18 bp, Artificial Sequence
  Description of Artificial Sequence: Synthetic oligonucleotide
ccaagaagcattttcttc

SEQ ID NO: 649 - DNA, 18 bp, Artificial Sequence
  Description of Artificial Sequence: Synthetic oligonucleotide
tctcaccaagaagcattt

SEQ ID NO: 650 - DNA, 18 bp, Artificial Sequence
  Description of Artificial Sequence: Synthetic oligonucleotide
gcctgtctcaccaagaag

SEQ ID NO: 651 - DNA, 18 bp, Artificial Sequence
  Description of Artificial Sequence: Synthetic oligonucleotide
gagaggcctgtctcacca

SEQ ID NO: 652 - DNA, 18 bp, Artificial Sequence
  Description of Artificial Sequence: Synthetic oligonucleotide
gctcagagaggcctgtct

SEQ ID NO: 653 - DNA, 18 bp, Artificial Sequence
  Description of Artificial Sequence: Synthetic oligonucleotide
ggcctgctcagagaggcc

SEQ ID NO: 654 - DNA, 18 bp, Artificial Sequence
  Description of Artificial Sequence: Synthetic oligonucleotide
ctggaggcctgctcagag

SEQ ID NO: 655 - DNA, 18 bp, Artificial Sequence
  Description of Artificial Sequence: Synthetic oligonucleotide
agattctggaggcctgct

SEQ ID NO: 656 - DNA, 18 bp, Artificial Sequence
  Description of Artificial Sequence: Synthetic oligonucleotide
aactcagattctggaggc

SEQ ID NO: 657 - DNA, 18 bp, Artificial Sequence
  Description of Artificial Sequence: Synthetic oligonucleotide
cctccaactcagattctg

SEQ ID NO: 658 - DNA, 18 bp, Artificial Sequence
  Description of Artificial Sequence: Synthetic oligonucleotide
ggcaacctccaactcaga

SEQ ID NO: 659 - DNA, 18 bp, Artificial Sequence
  Description of Artificial Sequence: Synthetic oligonucleotide
ttgggggcaacctccaac

SEQ ID NO: 660 - DNA, 18 bp, Artificial Sequence
  Description of Artificial Sequence: Synthetic oligonucleotide
ttcccttgggggcaacct

SEQ ID NO: 661 - DNA, 18 bp, Artificial Sequence
  Description of Artificial Sequence: Synthetic oligonucleotide
ctgtcttcccttgggggc

SEQ ID NO: 662 - DNA, 18 bp, Artificial Sequence
  Description of Artificial Sequence: Synthetic oligonucleotide
ctctcctgtcttcccttg

SEQ ID NO: 663 - DNA, 18 bp, Artificial Sequence
  Description of Artificial Sequence: Synthetic oligonucleotide
cttcgctctcctgtcttc

SEQ ID NO: 664 - DNA, 18 bp, Artificial Sequence
  Description of Artificial Sequence: Synthetic oligonucleotide
tggttcttcgctctcctg

SEQ ID NO: 665 - DNA, 18 bp, Artificial Sequence
  Description of Artificial Sequence: Synthetic oligonucleotide
ggctgtggttcttcgctc

SEQ ID NO: 666 - DNA, 18 bp, Artificial Sequence
  Description of Artificial Sequence: Synthetic oligonucleotide
atgagggctgtggttctt

SEQ ID NO: 667 - DNA, 18 bp, Artificial Sequence
  Description of Artificial Sequence: Synthetic oligonucleotide
actggatgagggctgtgg

SEQ ID NO: 668 - DNA, 18 bp, Artificial Sequence
  Description of Artificial Sequence: Synthetic oligonucleotide
ggtttactggatgagggc

SEQ ID NO: 669 - DNA, 18 bp, Artificial Sequence
  Description of Artificial Sequence: Synthetic oligonucleotide
cagagggtttactggatg

SEQ ID NO: 670 - DNA, 18 bp, Artificial Sequence
  Description of Artificial Sequence: Synthetic oligonucleotide
tttggcagagggtttact

SEQ ID NO: 671 - DNA, 18 bp, Artificial Sequence
  Description of Artificial Sequence: Synthetic oligonucleotide
gagcttttggcagagggt

SEQ ID NO: 672 - DNA, 18 bp, Artificial Sequence
  Description of Artificial Sequence: Synthetic oligonucleotide
acaatgagcttttggcag

SEQ ID NO: 673 - DNA, 18 bp, Artificial Sequence
  Description of Artificial Sequence: Synthetic oligonucleotide
ctgggacaatgagctttt

SEQ ID NO: 674 - DNA, 18 bp, Artificial Sequence
  Description of Artificial Sequence: Synthetic oligonucleotide
gaaatctgggacaatgag

SEQ ID NO: 675 - DNA, 18 bp, Artificial Sequence
  Description of Artificial Sequence: Synthetic oligonucleotide
cagaggaaatctgggaca

SEQ ID NO: 676 - DNA, 18 bp, Artificial Sequence
  Description of Artificial Sequence: Synthetic oligonucleotide
ggccgcagaggaaatctg

SEQ ID NO: 677 - DNA, 18 bp, Artificial Sequence
  Description of Artificial Sequence: Synthetic oligonucleotide
gaggtggccgcagaggaa

SEQ ID NO: 678 - DNA, 18 bp, Artificial Sequence
  Description of Artificial Sequence: Synthetic oligonucleotide
catgtgaggtggccgcag

SEQ ID NO: 679 - DNA, 18 bp, Artificial Sequence
  Description of Artificial Sequence: Synthetic oligonucleotide
tccaccatgtgaggtggc

SEQ ID NO: 680 - DNA, 18 bp, Artificial Sequence
  Description of Artificial Sequence: Synthetic oligonucleotide
gggggtccaccatgtgag

SEQ ID NO: 681 - DNA, 18 bp, Artificial Sequence
  Description of Artificial Sequence: Synthetic oligonucleotide
ctcccgggggtccaccat

SEQ ID NO: 682 - DNA, 18 bp, Artificial Sequence
  Description of Artificial Sequence: Synthetic oligonucleotide
cttgcctcccgggggtcc

SEQ ID NO: 683 - DNA, 18 bp, Artificial Sequence
  Description of Artificial Sequence: Synthetic oligonucleotide
gggcccttgcctcccggg

SEQ ID NO: 684 - DNA, 18 bp, Artificial Sequence
  Description of Artificial Sequence: Synthetic oligonucleotide
gccctgggcccttgcctc

SEQ ID NO: 685 - DNA, 18 bp, Artificial Sequence
  Description of Artificial Sequence: Synthetic oligonucleotide
gtcctgccctgggccctt

SEQ ID NO: 686 - DNA, 18 bp, Artificial Sequence
  Description of Artificial Sequence: Synthetic oligonucleotide
ggcctgtcctgccctggg

SEQ ID NO: 687 - DNA, 18 bp, Artificial Sequence
  Description of Artificial Sequence: Synthetic oligonucleotide
atgggggcctgtcctgcc

SEQ ID NO: 688 - DNA, 18 bp, Artificial Sequence
  Description of Artificial Sequence: Synthetic oligonucleotide
ccccaatgggggcctgtc

SEQ ID NO: 689 - DNA, 18 bp, Artificial Sequence
  Description of Artificial Sequence: Synthetic oligonucleotide
gtgggccccaatgggggc

SEQ ID NO: 690 - DNA, 18 bp, Artificial Sequence
  Description of Artificial Sequence: Synthetic oligonucleotide
gcacagtgggccccaatg

SEQ ID NO: 691 - DNA, 18 bp, Artificial Sequence
  Description of Artificial Sequence: Synthetic oligonucleotide
gtagggcacagtgggccc

SEQ ID NO: 692 - DNA, 18 bp, Artificial Sequence
  Description of Artificial Sequence: Synthetic oligonucleotide
tctgtgtagggcacagtg

SEQ ID NO: 693 - DNA, 18 bp, Artificial Sequence
  Description of Artificial Sequence: Synthetic oligonucleotide
gtgcttctgtgtagggca

SEQ ID NO: 694 - DNA, 18 bp, Artificial Sequence
  Description of Artificial Sequence: Synthetic oligonucleotide
ttgcagtgcttctgtgta

SEQ ID NO: 695 - DNA, 18 bp, Artificial Sequence
  Description of Artificial Sequence: Synthetic oligonucleotide
aacacttgcagtgcttct

SEQ ID NO: 696 - DNA, 18 bp, Artificial Sequence
  Description of Artificial Sequence: Synthetic oligonucleotide
ggtggaacacttgcagtg

SEQ ID NO: 697 - DNA, 18 bp, Artificial Sequence
  Description of Artificial Sequence: Synthetic oligonucleotide
ggggtggtggaacacttg

SEQ ID NO: 698 - DNA, 18 bp, Artificial Sequence
  Description of Artificial Sequence: Synthetic oligonucleotide
gcaacggggtggtggaac

SEQ ID NO: 699 - DNA, 18 bp, Artificial Sequence
  Description of Artificial Sequence: Synthetic oligonucleotide
tctgggcaacggggtggt

SEQ ID NO: 700 - DNA, 18 bp, Artificial Sequence
  Description of Artificial Sequence: Synthetic oligonucleotide
gggtgtctgggcaacggg

SEQ ID NO: 701 - DNA, 18 bp, Artificial Sequence
  Description of Artificial Sequence: Synthetic oligonucleotide
tgcaggggtgtctgggca

SEQ ID NO: 702 - DNA, 18 bp, Artificial Sequence
  Description of Artificial Sequence: Synthetic oligonucleotide
tctcatgcaggggtgtct

SEQ ID NO: 703 - DNA, 18 bp, Artificial Sequence
  Description of Artificial Sequence: Synthetic oligonucleotide
tggcttctcatgcagggg

SEQ ID NO: 704 - DNA, 18 bp, Artificial Sequence
  Description of Artificial Sequence: Synthetic oligonucleotide
aggtatggcttctcatgc

SEQ ID NO: 705 - DNA, 18 bp, Artificial Sequence
  Description of Artificial Sequence: Synthetic oligonucleotide
ggggcaggtatggcttct

SEQ ID NO: 706 - DNA, 18 bp, Artificial Sequence
  Description of Artificial Sequence: Synthetic oligonucleotide
tggtgggggcaggtatgg

SEQ ID NO: 707 - DNA, 18 bp, Artificial Sequence
  Description of Artificial Sequence: Synthetic oligonucleotide
gagactggtgggggcagg

SEQ ID NO: 708 - DNA, 18 bp, Artificial Sequence
  Description of Artificial Sequence: Synthetic oligonucleotide
aaagggagactggtgggg

SEQ ID NO: 709 - DNA, 18 bp, Artificial Sequence
  Description of Artificial Sequence: Synthetic oligonucleotide
ggagaaaagggagactgg

SEQ ID NO: 710 - DNA, 18 bp, Artificial Sequence
  Description of Artificial Sequence: Synthetic oligonucleotide
tggaaggagaaaagggag

SEQ ID NO: 711 - DNA, 18 bp, Artificial Sequence
  Description of Artificial Sequence: Synthetic oligonucleotide
gatgctggaaggagaaaa

SEQ ID NO: 712 - DNA, 18 bp, Artificial Sequence
  Description of Artificial Sequence: Synthetic oligonucleotide
cacgagatgctggaagga

SEQ ID NO: 713 - DNA, 18 bp, Artificial Sequence
  Description of Artificial Sequence: Synthetic oligonucleotide
tgctgcacgagatgctgg

SEQ ID NO: 714 - DNA, 18 bp, Artificial Sequence
  Description of Artificial Sequence: Synthetic oligonucleotide
gctcatgctgcacgagat

SEQ ID NO: 715 - DNA, 18 bp, Artificial Sequence
  Description of Artificial Sequence: Synthetic oligonucleotide
tcctggctcatgctgcac

SEQ ID NO: 716 - DNA, 18 bp, Artificial Sequence
  Description of Artificial Sequence: Synthetic oligonucleotide
gactgtcctggctcatgc

SEQ ID NO: 717 - DNA, 18 bp, Artificial Sequence
  Description of Artificial Sequence: Synthetic oligonucleotide
ctggagactgtcctggct

SEQ ID NO: 718 - DNA, 18 bp, Artificial Sequence
  Description of Artificial Sequence: Synthetic oligonucleotide
gaattctggagactgtcc

SEQ ID NO: 719 - DNA, 18 bp, Artificial Sequence
  Description of Artificial Sequence: Synthetic oligonucleotide
gagaagaattctggagac

SEQ ID NO: 720 - DNA, 18 bp, Artificial Sequence
  Description of Artificial Sequence: Synthetic oligonucleotide
gggtggagaagaattctg

SEQ ID NO: 721 - DNA, 18 bp, Artificial Sequence
  Description of Artificial Sequence: Synthetic oligonucleotide
ggcctgggtggagaagaa

SEQ ID NO: 722 - DNA, 18 bp, Artificial Sequence
  Description of Artificial Sequence: Synthetic oligonucleotide
gacatggcctgggtggag

SEQ ID NO: 723 - DNA, 18 bp, Artificial Sequence
  Description of Artificial Sequence: Synthetic oligonucleotide
ggctggacatggcctggg

SEQ ID NO: 724 - DNA, 18 bp, Artificial Sequence
  Description of Artificial Sequence: Synthetic oligonucleotide
caggaggctggacatggc

SEQ ID NO: 725 - DNA, 18 bp, Artificial Sequence
  Description of Artificial Sequence: Synthetic oligonucleotide
gaggacaggaggctggac

SEQ ID NO: 726 - DNA, 18 bp, Artificial Sequence
  Description of Artificial Sequence: Synthetic oligonucleotide
atggtgaggacaggaggc

SEQ ID NO: 727 - DNA, 18 bp, Artificial Sequence
  Description of Artificial Sequence: Synthetic oligonucleotide
ggagtatggtgaggacag

SEQ ID NO: 728 - DNA, 18 bp, Artificial Sequence
  Description of Artificial Sequence: Synthetic oligonucleotide
ggcatggagtatggtgag

SEQ ID NO: 729 - DNA, 18 bp, Artificial Sequence
  Description of Artificial Sequence: Synthetic oligonucleotide
gtgggggcatggagtatg

SEQ ID NO: 730 - DNA, 18 bp, Artificial Sequence
  Description of Artificial Sequence: Synthetic oligonucleotide
aggaagtgggggcatgga

SEQ ID NO: 731 - DNA, 18 bp, Artificial Sequence
  Description of Artificial Sequence: Synthetic oligonucleotide
gagggaggaagtgggggc

SEQ ID NO: 732 - DNA, 18 bp, Artificial Sequence
  Description of Artificial Sequence: Synthetic oligonucleotide
ataaggagggaggaagtg

SEQ ID NO: 733 - DNA, 18 bp, Artificial Sequence
  Description of Artificial Sequence: Synthetic oligonucleotide
ttgaaataaggagggagg

SEQ ID NO: 734 - DNA, 18 bp, Artificial Sequence
  Description of Artificial Sequence: Synthetic oligonucleotide
ggggcttgaaataaggag

SEQ ID NO: 735 - DNA, 18 bp, Artificial Sequence
  Description of Artificial Sequence: Synthetic oligonucleotide
gcggtggggcttgaaata

SEQ ID NO: 736 - DNA, 18 bp, Artificial Sequence
  Description of Artificial Sequence: Synthetic oligonucleotide
aggaagcggtggggcttg

SEQ ID NO: 737 - DNA, 18 bp, Artificial Sequence
  Description of Artificial Sequence: Synthetic oligonucleotide
tggagaggaagcggtggg

SEQ ID NO: 738 - DNA, 18 bp, Artificial Sequence
  Description of Artificial Sequence: Synthetic oligonucleotide
taggctggagaggaagcg

SEQ ID NO: 739 - DNA, 18 bp, Artificial Sequence
  Description of Artificial Sequence: Synthetic oligonucleotide
aacagtaggctggagagg

SEQ ID NO: 740 - DNA, 18 bp, Artificial Sequence
  Description of Artificial Sequence: Synthetic oligonucleotide
tgcagaacagtaggctgg

SEQ ID NO: 741 - DNA, 18 bp, Artificial Sequence
  Description of Artificial Sequence: Synthetic oligonucleotide
ctgggtgcagaacagtag

SEQ ID NO: 742 - DNA, 18 bp, Artificial Sequence
  Description of Artificial Sequence: Synthetic oligonucleotide
ttggcctgggtgcagaac

SEQ ID NO: 743 - DNA, 18 bp, Artificial Sequence
  Description of Artificial Sequence: Synthetic oligonucleotide
tggagttggcctgggtgc

SEQ ID NO: 744 - DNA, 18 bp, Artificial Sequence
  Description of Artificial Sequence: Synthetic oligonucleotide
ggagatggagttggcctg

SEQ ID NO: 745 - DNA, 18 bp, Artificial Sequence
  Description of Artificial Sequence: Synthetic oligonucleotide
ctgggggagatggagttg

SEQ ID NO: 746 - DNA, 18 bp, Artificial Sequence
  Description of Artificial Sequence: Synthetic oligonucleotide
atgagctgggggagatgg

SEQ ID NO: 747 - DNA, 18 bp, Artificial Sequence
  Description of Artificial Sequence: Synthetic oligonucleotide
gaggcatgagctggggga

SEQ ID NO: 748 - DNA, 18 bp, Artificial Sequence
  Description of Artificial Sequence: Synthetic oligonucleotide
tgggtgaggcatgagctg

SEQ ID NO: 749 - DNA, 18 bp, Artificial Sequence
  Description of Artificial Sequence: Synthetic oligonucleotide
ttggctgggtgaggcatg

SEQ ID NO: 750 - DNA, 18 bp, Artificial Sequence
  Description of Artificial Sequence: Synthetic oligonucleotide
ggatgttggctgggtgag

SEQ ID NO: 751 - DNA, 18 bp, Artificial Sequence
  Description of Artificial Sequence: Synthetic oligonucleotide
gaaggggatgttggctgg

SEQ ID NO: 752 - DNA, 18 bp, Artificial Sequence
  Description of Artificial Sequence: Synthetic oligonucleotide
tgcctgaaggggatgttg

SEQ ID NO: 753 - DNA, 18 bp, Artificial Sequence
  Description of Artificial Sequence: Synthetic oligonucleotide
ggggctgcctgaagggga

SEQ ID NO: 754 - DNA, 18 bp, Artificial Sequence
  Description of Artificial Sequence: Synthetic oligonucleotide
ggaagggggctgcctgaa

SEQ ID NO: 755 - DNA, 18 bp, Artificial Sequence
  Description of Artificial Sequence: Synthetic oligonucleotide
aggaaggaagggggctgc

SEQ ID NO: 756 - DNA, 18 bp, Artificial Sequence
  Description of Artificial Sequence: Synthetic oligonucleotide
tggggaggaaggaagggg

SEQ ID NO: 757 - DNA, 18 bp, Artificial Sequence
  Description of Artificial Sequence: Synthetic oligonucleotide
tggcatggggaggaagga

SEQ ID NO: 758 - DNA, 18 bp, Artificial Sequence
  Description of Artificial Sequence: Synthetic oligonucleotide
gggtatggcatggggagg

SEQ ID NO: 759 - DNA, 18 bp, Artificial Sequence
  Description of Artificial Sequence: Synthetic oligonucleotide
aggtcgggtatggcatgg

SEQ ID NO: 760 - DNA, 18 bp, Artificial Sequence
  Description of Artificial Sequence: Synthetic oligonucleotide
tgaggaggtcgggtatgg

SEQ ID NO: 761 - DNA, 18 bp, Artificial Sequence
  Description of Artificial Sequence: Synthetic oligonucleotide
agtgctgaggaggtcggg

SEQ ID NO: 762 - DNA, 18 bp, Artificial Sequence
  Description of Artificial Sequence: Synthetic oligonucleotide
aagacagtgctgaggagg

SEQ ID NO: 763 - DNA, 18 bp, Artificial Sequence
  Description of Artificial Sequence: Synthetic oligonucleotide
cccagaagacagtgctga

SEQ ID NO: 764 - DNA, 18 bp, Artificial Sequence
  Description of Artificial Sequence: Synthetic oligonucleotide
aaaaacccagaagacagt

SEQ ID NO: 765 - DNA, 18 bp, Artificial Sequence
  Description of Artificial Sequence: Synthetic oligonucleotide
gcaggaaaaacccagaag

SEQ ID NO: 766 - DNA, 18 bp, Artificial Sequence
  Description of Artificial Sequence: Synthetic oligonucleotide
cagaggcaggaaaaaccc

SEQ ID NO: 767 - DNA, 18 bp, Artificial Sequence
  Description of Artificial Sequence: Synthetic oligonucleotide
gattgcagaggcaggaaa

SEQ ID NO: 768 - DNA, 18 bp, Artificial Sequence
  Description of Artificial Sequence: Synthetic oligonucleotide
actgggattgcagaggca

SEQ ID NO: 769 - DNA, 18 bp, Artificial Sequence
  Description of Artificial Sequence: Synthetic oligonucleotide
tgcaaactgggattgcag

SEQ ID NO: 770 - DNA, 18 bp, Artificial Sequence
  Description of Artificial Sequence: Synthetic oligonucleotide
tgaagtgcaaactgggat

SEQ ID NO: 771 - DNA, 18 bp, Artificial Sequence
  Description of Artificial Sequence: Synthetic oligonucleotide
ggagctgaagtgcaaact

SEQ ID NO: 772 - DNA, 18 bp, Artificial Sequence
  Description of Artificial Sequence: Synthetic oligonucleotide
accagggagctgaagtgc

SEQ ID NO: 773 - DNA, 18 bp, Artificial Sequence
  Description of Artificial Sequence: Synthetic oligonucleotide
acatcaccagggagctga

SEQ ID NO: 774 - DNA, 18 bp, Artificial Sequence
  Description of Artificial Sequence: Synthetic oligonucleotide
tttccacatcaccaggga

SEQ ID NO: 775 - DNA, 18 bp, Artificial Sequence
  Description of Artificial Sequence: Synthetic oligonucleotide
atggctttccacatcacc

SEQ ID NO: 776 - DNA, 18 bp, Artificial Sequence
  Description of Artificial Sequence: Synthetic oligonucleotide
ggcagatggctttccaca

SEQ ID NO: 777 - DNA, 18 bp, Artificial Sequence
  Description of Artificial Sequence: Synthetic oligonucleotide
tctggggcagatggcttt

SEQ ID NO: 778 - DNA, 18 bp, Artificial Sequence
  Description of Artificial Sequence: Synthetic oligonucleotide
tttgatctggggcagatg

SEQ ID NO: 779 - DNA, 18 bp, Artificial Sequence
  Description of Artificial Sequence: Synthetic oligonucleotide
ctggttttgatctggggc

SEQ ID NO: 780 - DNA, 18 bp, Artificial Sequence
  Description of Artificial Sequence: Synthetic oligonucleotide
ccaggctggttttgatct

SEQ ID NO: 781 - DNA, 18 bp, Artificial Sequence
  Description of Artificial Sequence: Synthetic oligonucleotide
tggggccaggctggtttt

SEQ ID NO: 782 - DNA, 18 bp, Artificial Sequence
  Description of Artificial Sequence: Synthetic oligonucleotide
gccagtggggccaggctg

SEQ ID NO: 783 - DNA, 18 bp, Artificial Sequence
  Description of Artificial Sequence: Synthetic oligonucleotide
ctgttgccagtggggcca

SEQ ID NO: 784 - DNA, 18 bp, Artificial Sequence
  Description of Artificial Sequence: Synthetic oligonucleotide
acttcctgttgccagtgg

SEQ ID NO: 785 - DNA, 18 bp, Artificial Sequence
  Description of Artificial Sequence: Synthetic oligonucleotide
ccagcacttcctgttgcc

SEQ ID NO: 786 - DNA, 18 bp, Artificial Sequence
  Description of Artificial Sequence: Synthetic oligonucleotide
agaggccagcacttcctg

SEQ ID NO: 787 - DNA, 18 bp, Artificial Sequence
  Description of Artificial Sequence: Synthetic oligonucleotide
gggggagaggccagcact

SEQ ID NO: 788 - DNA, 18 bp, Artificial Sequence
  Description of Artificial Sequence: Synthetic oligonucleotide
gtgctgggggagaggcca

SEQ ID NO: 789 - DNA, 18 bp, Artificial Sequence
  Description of Artificial Sequence: Synthetic oligonucleotide
actctgtgctgggggaga

SEQ ID NO: 790 - DNA, 18 bp, Artificial Sequence
  Description of Artificial Sequence: Synthetic oligonucleotide
gctgtactctgtgctggg

SEQ ID NO: 791 - DNA, 18 bp, Artificial Sequence
  Description of Artificial Sequence: Synthetic oligonucleotide
tcactgctgtactctgtg

SEQ ID NO: 792 - DNA, 18 bp, Artificial Sequence
  Description of Artificial Sequence: Synthetic oligonucleotide
ggatgtcactgctgtact

SEQ ID NO: 793 - DNA, 18 bp, Artificial Sequence
  Description of Artificial Sequence: Synthetic oligonucleotide
tagccggatgtcactgct

SEQ ID NO: 794 - DNA, 18 bp, Artificial Sequence
  Description of Artificial Sequence: Synthetic oligonucleotide
gggggtagccggatgtca

SEQ ID NO: 795 - DNA, 18 bp, Artificial Sequence
  Description of Artificial Sequence: Synthetic oligonucleotide
ccacagggggtagccgga

SEQ ID NO: 796 - DNA, 18 bp, Artificial Sequence
  Description of Artificial Sequence: Synthetic oligonucleotide
gggagccacagggggtag

SEQ ID NO: 797 - DNA, 18 bp, Artificial Sequence
  Description of Artificial Sequence: Synthetic oligonucleotide
gctgggggagccacaggg

SEQ ID NO: 798 - DNA, 18 bp, Artificial Sequence
  Description of Artificial Sequence: Synthetic oligonucleotide
agctggctgggggagcca

SEQ ID NO: 799 - DNA, 18 bp, Artificial Sequence
  Description of Artificial Sequence: Synthetic oligonucleotide
tgaggagctggctggggg

SEQ ID NO: 800 - DNA, 18 bp, Artificial Sequence
  Description of Artificial Sequence: Synthetic oligonucleotide
ggtgctgaggagctggct

SEQ ID NO: 801 - DNA, 18 bp, Artificial Sequence
  Description of Artificial Sequence: Synthetic oligonucleotide
atgtaggtgctgaggagc

SEQ ID NO: 802 - DNA, 18 bp, Artificial Sequence
  Description of Artificial Sequence: Synthetic oligonucleotide
agctgatgtaggtgctga

SEQ ID NO: 803 - DNA, 18 bp, Artificial Sequence
  Description of Artificial Sequence: Synthetic oligonucleotide
ggaggagctgatgtaggt

SEQ ID NO: 804 - DNA, 18 bp, Artificial Sequence
  Description of Artificial Sequence: Synthetic oligonucleotide
ccagtggaggagctgatg

SEQ ID NO: 805 - DNA, 18 bp, Artificial Sequence
  Description of Artificial Sequence: Synthetic oligonucleotide
cagggccagtggaggagc

SEQ ID NO: 806 - DNA, 18 bp, Artificial Sequence
  Description of Artificial Sequence: Synthetic oligonucleotide
gcaggcagggccagtgga

SEQ ID NO: 807 - DNA, 18 bp, Artificial Sequence
  Description of Artificial Sequence: Synthetic oligonucleotide
gacaggcaggcagggcca

SEQ ID NO: 808 - DNA, 18 bp, Artificial Sequence
  Description of Artificial Sequence: Synthetic oligonucleotide
gtctggacaggcaggcag

SEQ ID NO: 809 - DNA, 18 bp, Artificial Sequence
  Description of Artificial Sequence: Synthetic oligonucleotide
atggtgtctggacaggca

SEQ ID NO: 810 - DNA, 18 bp, Artificial Sequence
  Description of Artificial Sequence: Synthetic oligonucleotide
acaccatggtgtctggac

SEQ ID NO: 811 - DNA, 18 bp, Artificial Sequence
  Description of Artificial Sequence: Synthetic oligonucleotide
cagggacaccatggtgtc

SEQ ID NO: 812 - DNA, 18 bp, Artificial Sequence
  Description of Artificial Sequence: Synthetic oligonucleotide
acaaccagggacaccatg

SEQ ID NO: 813 - DNA, 18 bp, Artificial Sequence
  Description of Artificial Sequence: Synthetic oligonucleotide
caggcacaaccagggaca

SEQ ID NO: 814 - DNA, 18 bp, Artificial Sequence
  Description of Artificial Sequence: Synthetic oligonucleotide
acggacaggcacaaccag

SEQ ID NO: 815 - DNA, 18 bp, Artificial Sequence
  Description of Artificial Sequence: Synthetic oligonucleotide
tgaacacggacaggcaca

SEQ ID NO: 816 - DNA, 18 bp, Artificial Sequence
  Description of Artificial Sequence: Synthetic oligonucleotide
tggtctgaacacggacag

SEQ ID NO: 817 - DNA, 18 bp, Artificial Sequence
  Description of Artificial Sequence: Synthetic oligonucleotide
catattggtctgaacacg

SEQ ID NO: 818 - DNA, 18 bp, Artificial Sequence
  Description of Artificial Sequence: Synthetic oligonucleotide
gacggcatattggtctga

SEQ ID NO: 819 - DNA, 18 bp, Artificial Sequence
  Description of Artificial Sequence: Synthetic oligonucleotide
cataggacggcatattgg

SEQ ID NO: 820 - DNA, 18 bp, Artificial Sequence
  Description of Artificial Sequence: Synthetic oligonucleotide
gctcccataggacggcat

SEQ ID NO: 821 - DNA, 18 bp, Artificial Sequence
  Description of Artificial Sequence: Synthetic oligonucleotide
attgcgctcccataggac

SEQ ID NO: 822 - DNA, 18 bp, Artificial Sequence
  Description of Artificial Sequence: Synthetic oligonucleotide
tgtacattgcgctcccat

SEQ ID NO: 823 - DNA, 18 bp, Artificial Sequence
  Description of Artificial Sequence: Synthetic oligonucleotide
ggtggtgtacattgcgct

SEQ ID NO: 824 - DNA, 18 bp, Artificial Sequence
  Description of Artificial Sequence: Synthetic oligonucleotide
gaaagggtggtgtacatt

SEQ ID NO: 825 - DNA, 18 bp, Artificial Sequence
  Description of Artificial Sequence: Synthetic oligonucleotide
tctgggaaagggtggtgt

SEQ ID NO: 826 - DNA, 18 bp, Artificial Sequence
  Description of Artificial Sequence: Synthetic oligonucleotide
caagatctgggaaagggt

SEQ ID NO: 827 - DNA, 18 bp, Artificial Sequence
  Description of Artificial Sequence: Synthetic oligonucleotide
gtgaccaagatctgggaa

SEQ ID NO: 828 - DNA, 18 bp, Artificial Sequence
  Description of Artificial Sequence: Synthetic oligonucleotide
actgggtgaccaagatct

SEQ ID NO: 829 - DNA, 18 bp, Artificial Sequence
  Description of Artificial Sequence: Synthetic oligonucleotide
ttgggactgggtgaccaa

SEQ ID NO: 830 - DNA, 18 bp, Artificial Sequence
  Description of Artificial Sequence: Synthetic oligonucleotide
ctgccttgggactgggtg

SEQ ID NO: 831 - DNA, 18 bp, Artificial Sequence
  Description of Artificial Sequence: Synthetic oligonucleotide
ctgagctgccttgggact

SEQ ID NO: 832 - DNA, 18 bp, Artificial Sequence
  Description of Artificial Sequence: Synthetic oligonucleotide
agttgctgagctgccttg

SEQ ID NO: 833 - DNA, 18 bp, Artificial Sequence
  Description of Artificial Sequence: Synthetic oligonucleotide
gccacagttgctgagctg

SEQ ID NO: 834 - DNA, 18 bp, Artificial Sequence
  Description of Artificial Sequence: Synthetic oligonucleotide
gaagtgccacagttgctg

SEQ ID NO: 835 - DNA, 18 bp, Artificial Sequence
  Description of Artificial Sequence: Synthetic oligonucleotide
cttgggaagtgccacagt

SEQ ID NO: 836 - DNA, 18 bp, Artificial Sequence
  Description of Artificial Sequence: Synthetic oligonucleotide
tcaaacttgggaagtgcc

SEQ ID NO: 837 - DNA, 18 bp, Artificial Sequence
  Description of Artificial Sequence: Synthetic oligonucleotide
gttcctcaaacttgggaa

SEQ ID NO: 838 - DNA, 18 bp, Artificial Sequence
  Description of Artificial Sequence: Synthetic oligonucleotide
tgggggttcctcaaactt

SEQ ID NO: 839 - DNA, 18 bp, Artificial Sequence
  Description of Artificial Sequence: Synthetic oligonucleotide
tttgatgggggttcctca

SEQ ID NO: 840 - DNA, 18 bp, Artificial Sequence
  Description of Artificial Sequence: Synthetic oligonucleotide
tcccctttgatgggggtt

SEQ ID NO: 841 - DNA, 18 bp, Artificial Sequence
  Description of Artificial Sequence: Synthetic oligonucleotide
agtcgtcccctttgatgg

SEQ ID NO: 842 - DNA, 18 bp, Artificial Sequence
  Description of Artificial Sequence: Synthetic oligonucleotide
catacagtcgtccccttt

SEQ ID NO: 843 - DNA, 18 bp, Artificial Sequence
  Description of Artificial Sequence: Synthetic oligonucleotide
caccacatacagtcgtcc

SEQ ID NO: 844 - DNA, 18 bp, Artificial Sequence
  Description of Artificial Sequence: Synthetic oligonucleotide
atctgcaccacatacagt

SEQ ID NO: 845 - DNA, 18 bp, Artificial Sequence
  Description of Artificial Sequence: Synthetic oligonucleotide
tgcacatctgcaccacat

SEQ ID NO: 846 - DNA, 18 bp, Artificial Sequence
  Description of Artificial Sequence: Synthetic oligonucleotide
cctcatgcacatctgcac

SEQ ID NO: 847 - DNA, 18 bp, Artificial Sequence
  Description of Artificial Sequence: Synthetic oligonucleotide
cccaacctcatgcacatc

SEQ ID NO: 848 - DNA, 18 bp, Artificial Sequence
  Description of Artificial Sequence: Synthetic oligonucleotide
ccgggcccaacctcatgc

SEQ ID NO: 849 - DNA, 18 bp, Artificial Sequence
  Description of Artificial Sequence: Synthetic oligonucleotide
aagggccgggcccaacct

SEQ ID NO: 850 - DNA, 18 bp, Artificial Sequence
  Description of Artificial Sequence: Synthetic oligonucleotide
cccagaagggccgggccc

SEQ ID NO: 851 - DNA, 18 bp, Artificial Sequence
  Description of Artificial Sequence: Synthetic oligonucleotide
cttaacccagaagggccg

SEQ ID NO: 852 - DNA, 18 bp, Artificial Sequence
  Description of Artificial Sequence: Synthetic oligonucleotide
cttcacttaacccagaag

SEQ ID NO: 853 - DNA, 18 bp, Artificial Sequence
  Description of Artificial Sequence: Synthetic oligonucleotide
ttgctcttcacttaaccc

SEQ ID NO: 854 - DNA, 18 bp, Artificial Sequence
  Description of Artificial Sequence: Synthetic oligonucleotide
ctgctttgctcttcactt

SEQ ID NO: 855 - DNA, 18 bp, Artificial Sequence
  Description of Artificial Sequence: Synthetic oligonucleotide
aagctctgctttgctctt

SEQ ID NO: 856 - DNA, 18 bp, Artificial Sequence
  Description of Artificial Sequence: Synthetic oligonucleotide
tgggaaagctctgctttg

SEQ ID NO: 857 - DNA, 18 bp, Artificial Sequence
  Description of Artificial Sequence: Synthetic oligonucleotide
ggagttgggaaagctctg

SEQ ID NO: 858 - DNA, 18 bp, Artificial Sequence
  Description of Artificial Sequence: Synthetic oligonucleotide
ggtatggagttgggaaag

SEQ ID NO: 859 - DNA, 18 bp, Artificial Sequence
  Description of Artificial Sequence: Synthetic oligonucleotide
tctcaggtatggagttgg

SEQ ID NO: 860 - DNA, 18 bp, Artificial Sequence
  Description of Artificial Sequence: Synthetic oligonucleotide
ggcactctcaggtatgga

SEQ ID NO: 861 - DNA, 18 bp, Artificial Sequence
  Description of Artificial Sequence: Synthetic oligonucleotide
tcacaggcactctcaggt

SEQ ID NO: 862 - DNA, 18 bp, Artificial Sequence
  Description of Artificial Sequence: Synthetic oligonucleotide
taatgtcacaggcactct

SEQ ID NO: 863 - DNA, 18 bp, Artificial Sequence
  Description of Artificial Sequence: Synthetic oligonucleotide
tcaggtaatgtcacaggc

SEQ ID NO: 864 - DNA, 18 bp, Artificial Sequence
  Description of Artificial Sequence: Synthetic oligonucleotide
ttctttcaggtaatgtca

SEQ ID NO: 865 - DNA, 18 bp, Artificial Sequence
  Description of Artificial Sequence: Synthetic oligonucleotide
gccttttctttcaggtaa

SEQ ID NO: 866 - DNA, 18 bp, Artificial Sequence
  Description of Artificial Sequence: Synthetic oligonucleotide
gaagtgccttttctttca

SEQ ID NO: 867 - DNA, 18 bp, Artificial Sequence
  Description of Artificial Sequence: Synthetic oligonucleotide
acagggaagtgccttttc

SEQ ID NO: 868 - DNA, 18 bp, Artificial Sequence
  Description of Artificial Sequence: Synthetic oligonucleotide
tgatgacagggaagtgcc

SEQ ID NO: 869 - DNA, 18 bp, Artificial Sequence
  Description of Artificial Sequence: Synthetic oligonucleotide
ctctctgatgacagggaa

SEQ ID NO: 870 - DNA, 18 bp, Artificial Sequence
  Description of Artificial Sequence: Synthetic oligonucleotide
agatactctctgatgaca

SEQ ID NO: 871 - DNA, 18 bp, Artificial Sequence
  Description of Artificial Sequence: Synthetic oligonucleotide
gctcaagatactctctga

SEQ ID NO: 872 - DNA, 18 bp, Artificial Sequence
  Description of Artificial Sequence: Synthetic oligonucleotide
tccaggctcaagatactc

SEQ ID NO: 873 - DNA, 18 bp, Artificial Sequence
  Description of Artificial Sequence: Synthetic oligonucleotide
tcccctccaggctcaaga

SEQ ID NO: 874 - DNA, 18 bp, Artificial Sequence
  Description of Artificial Sequence: Synthetic oligonucleotide
tgaactcccctccaggct

SEQ ID NO: 875 - DNA, 18 bp, Artificial Sequence
  Description of Artificial Sequence: Synthetic oligonucleotide
gttgatgaactcccctcc

SEQ ID NO: 876 - DNA, 18 bp, Artificial Sequence
  Description of Artificial Sequence: Synthetic oligonucleotide
ctgctgttgatgaactcc

SEQ ID NO: 877 - DNA, 18 bp, Artificial Sequence
  Description of Artificial Sequence: Synthetic oligonucleotide
tccccctgctgttgatga

SEQ ID NO: 878 - DNA, 18 bp, Artificial Sequence
  Description of Artificial Sequence: Synthetic oligonucleotide
ttgcttccccctgctgtt

SEQ ID NO: 879 - DNA, 18 bp, Artificial Sequence
  Description of Artificial Sequence: Synthetic oligonucleotide
cacgtttgcttccccctg

SEQ ID NO: 880 - DNA, 18 bp, Artificial Sequence
  Description of Artificial Sequence: Synthetic oligonucleotide
aaggacacgtttgcttcc

SEQ ID NO: 881 - DNA, 18 bp, Artificial Sequence
  Description of Artificial Sequence: Synthetic oligonucleotide
ggtgaaaggacacgtttg

SEQ ID NO: 882 - DNA, 18 bp, Artificial Sequence
  Description of Artificial Sequence: Synthetic oligonucleotide
cagctggtgaaaggacac

SEQ ID NO: 883 - DNA, 18 bp, Artificial Sequence
  Description of Artificial Sequence: Synthetic oligonucleotide
gctgccagctggtgaaag

SEQ ID NO: 884 - DNA, 18 bp, Artificial Sequence
  Description of Artificial Sequence: Synthetic oligonucleotide
tcaaggctgccagctggt

SEQ ID NO: 885 - DNA, 18 bp, Artificial Sequence
  Description of Artificial Sequence: Synthetic oligonucleotide
taagttcaaggctgccag

SEQ ID NO: 886 - DNA, 18 bp, Artificial Sequence
  Description of Artificial Sequence: Synthetic oligonucleotide
catggtaagttcaaggct

SEQ ID NO: 887 - DNA, 18 bp, Artificial Sequence
  Description of Artificial Sequence: Synthetic oligonucleotide
gtttccatggtaagttca

SEQ ID NO: 888 - DNA, 18 bp, Artificial Sequence
  Description of Artificial Sequence: Synthetic oligonucleotide
gctgggtttccatggtaa

SEQ ID NO: 889 - DNA, 18 bp, Artificial Sequence
  Description of Artificial Sequence: Synthetic oligonucleotide
ttgctgctgggtttccat

SEQ ID NO: 890 - DNA, 18 bp, Artificial Sequence
  Description of Artificial Sequence: Synthetic oligonucleotide
cttttttgctgctgggtt

SEQ ID NO: 891 - DNA, 18 bp, Artificial Sequence
  Description of Artificial Sequence: Synthetic oligonucleotide
tcactcttttttgctgct

SEQ ID NO: 892 - DNA, 18 bp, Artificial Sequence
  Description of Artificial Sequence: Synthetic oligonucleotide
ctccttcactcttttttg

SEQ ID NO: 893 - DNA, 18 bp, Artificial Sequence
  Description of Artificial Sequence: Synthetic oligonucleotide
tcctcctccttcactctt

SEQ ID NO: 894 - DNA, 18 bp, Artificial Sequence
  Description of Artificial Sequence: Synthetic oligonucleotide
aagcctcctcctccttca

SEQ ID NO: 895 - DNA, 18 bp, Artificial Sequence
  Description of Artificial Sequence: Synthetic oligonucleotide
cttggaagcctcctcctc

SEQ ID NO: 896 - DNA, 18 bp, Artificial Sequence
  Description of Artificial Sequence: Synthetic oligonucleotide
tctgccttggaagcctcc

SEQ ID NO: 897 - DNA, 18 bp, Artificial Sequence
  Description of Artificial Sequence: Synthetic oligonucleotide
tttcatctgccttggaag

SEQ ID NO: 898 - DNA, 18 bp, Artificial Sequence
  Description of Artificial Sequence: Synthetic oligonucleotide
aagtttttcatctgcctt

SEQ ID NO: 899 - DNA, 18 bp, Artificial Sequence
  Description of Artificial Sequence: Synthetic oligonucleotide
agctcaagtttttcatct

SEQ ID NO: 900 - DNA, 18 bp, Artificial Sequence
  Description of Artificial Sequence: Synthetic oligonucleotide
ttaccagctcaagttttt

SEQ ID NO: 901 - DNA, 18 bp, Artificial Sequence
  Description of Artificial Sequence: Synthetic oligonucleotide
tggttttaccagctcaag

SEQ ID NO: 902 - DNA, 18 bp, Artificial Sequence
  Description of Artificial Sequence: Synthetic oligonucleotide
ctgcatggttttaccagc

SEQ ID NO: 903 - DNA, 18 bp, Artificial Sequence
  Description of Artificial Sequence: Synthetic oligonucleotide
ccacactgcatggtttta

SEQ ID NO: 904 - DNA, 18 bp, Artificial Sequence
  Description of Artificial Sequence: Synthetic oligonucleotide
aaggaccacactgcatgg

SEQ ID NO: 905 - DNA, 18 bp, Artificial Sequence
  Description of Artificial Sequence: Synthetic oligonucleotide
ctggtaaggaccacactg

SEQ ID NO: 906 - DNA, 18 bp, Artificial Sequence
  Description of Artificial Sequence: Synthetic oligonucleotide
cggtgctggtaaggacca

SEQ ID NO: 907 - DNA, 18 bp, Artificial Sequence
  Description of Artificial Sequence: Synthetic oligonucleotide
atcctcggtgctggtaag

SEQ ID NO: 908 - DNA, 18 bp, Artificial Sequence
  Description of Artificial Sequence: Synthetic oligonucleotide
ttcccatcctcggtgctg

SEQ ID NO: 909 - DNA, 18 bp, Artificial Sequence
  Description of Artificial Sequence: Synthetic oligonucleotide
gcctcttcccatcctcgg

SEQ ID NO: 910 - DNA, 18 bp, Artificial Sequence
  Description of Artificial Sequence: Synthetic oligonucleotide
ctctggcctcttcccatc

SEQ ID NO: 911 - DNA, 18 bp, Artificial Sequence
  Description of Artificial Sequence: Synthetic oligonucleotide
gatttctctggcctcttc

SEQ ID NO: 912 - DNA, 18 bp, Artificial Sequence
  Description of Artificial Sequence: Synthetic oligonucleotide
agtgggatttctctggcc

SEQ ID NO: 913 - DNA, 18 bp, Artificial Sequence
  Description of Artificial Sequence: Synthetic oligonucleotide
gcctaagtgggatttctc

SEQ ID NO: 914 - DNA, 18 bp, Artificial Sequence
  Description of Artificial Sequence: Synthetic oligonucleotide
tggttgcctaagtgggat

SEQ ID NO: 915 - DNA, 18 bp, Artificial Sequence
  Description of Artificial Sequence: Synthetic oligonucleotide
ggccctggttgcctaagt

SEQ ID NO: 916 - DNA, 18 bp, Artificial Sequence
  Description of Artificial Sequence: Synthetic oligonucleotide
gccttggccctggttgcc

SEQ ID NO: 917 - DNA, 18 bp, Artificial Sequence
  Description of Artificial Sequence: Synthetic oligonucleotide
ctcctgccttggccctgg

SEQ ID NO: 918 - DNA, 18 bp, Artificial Sequence
  Description of Artificial Sequence: Synthetic oligonucleotide
gctccctcctgccttggc

SEQ ID NO: 919 - DNA, 18 bp, Artificial Sequence
  Description of Artificial Sequence: Synthetic oligonucleotide
ttctagctccctcctgcc

SEQ ID NO: 920 - DNA, 18 bp, Artificial Sequence
  Description of Artificial Sequence: Synthetic oligonucleotide
agcatttctagctccctc

SEQ ID NO: 921 - DNA, 18 bp, Artificial Sequence
  Description of Artificial Sequence: Synthetic oligonucleotide
tggacagcatttctagct

SEQ ID NO: 922 - DNA, 18 bp, Artificial Sequence
  Description of Artificial Sequence: Synthetic oligonucleotide
caggctggacagcatttc

SEQ ID NO: 923 - DNA, 18 bp, Artificial Sequence
  Description of Artificial Sequence: Synthetic oligonucleotide
gaggacaggctggacagc

SEQ ID NO: 924 - DNA, 18 bp, Artificial Sequence
  Description of Artificial Sequence: Synthetic oligonucleotide
gatctgaggacaggctgg

SEQ ID NO: 925 - DNA, 18 bp, Artificial Sequence
  Description of Artificial Sequence: Synthetic oligonucleotide
agatggatctgaggacag

SEQ ID NO: 926 - DNA, 18 bp, Artificial Sequence
  Description of Artificial Sequence: Synthetic oligonucleotide
gtgtcagatggatctgag

SEQ ID NO: 927 - DNA, 18 bp, Artificial Sequence
  Description of Artificial Sequence: Synthetic oligonucleotide
cctttgtgtcagatggat

SEQ ID NO: 928 - DNA, 18 bp, Artificial Sequence
  Description of Artificial Sequence: Synthetic oligonucleotide
aatttcctttgtgtcaga

SEQ ID NO: 929 - DNA, 18 bp, Artificial Sequence
  Description of Artificial Sequence: Synthetic oligonucleotide
ggaggaatttcctttgtg

SEQ ID NO: 930 - DNA, 18 bp, Artificial Sequence
  Description of Artificial Sequence: Synthetic oligonucleotide
ggaggggaggaatttcct

SEQ ID NO: 931 - DNA, 18 bp, Artificial Sequence
  Description of Artificial Sequence: Synthetic oligonucleotide
gtgagggaggggaggaat

SEQ ID NO: 932 - DNA, 18 bp, Artificial Sequence
  Description of Artificial Sequence: Synthetic oligonucleotide
gcagggtgagggagggga

SEQ ID NO: 933 - DNA, 18 bp, Artificial Sequence
  Description of Artificial Sequence: Synthetic oligonucleotide
acaatgcagggtgaggga

SEQ ID NO: 934 - DNA, 18 bp, Artificial Sequence
  Description of Artificial Sequence: Synthetic oligonucleotide
atgggacaatgcagggtg

SEQ ID NO: 935 - DNA, 18 bp, Artificial Sequence
  Description of Artificial Sequence: Synthetic oligonucleotide
gtcccatgggacaatgca

SEQ ID NO: 936 - DNA, 18 bp, Artificial Sequence
  Description of Artificial Sequence: Synthetic oligonucleotide
gggctgtcccatgggaca

SEQ ID NO: 937 - DNA, 18 bp, Artificial Sequence
  Description of Artificial Sequence: Synthetic oligonucleotide
gcctggggctgtcccatg

SEQ ID NO: 938 - DNA, 18 bp, Artificial Sequence
  Description of Artificial Sequence: Synthetic oligonucleotide
tctgagcctggggctgtc

SEQ ID NO: 939 - DNA, 18 bp, Artificial Sequence
  Description of Artificial Sequence: Synthetic oligonucleotide
aagcttctgagcctgggg

SEQ ID NO: 940 - DNA, 18 bp, Artificial Sequence
  Description of Artificial Sequence: Synthetic oligonucleotide
cttcaaagcttctgagcc

SEQ ID NO: 941 - DNA, 18 bp, Artificial Sequence
  Description of Artificial Sequence: Synthetic oligonucleotide
tattccttcaaagcttct

SEQ ID NO: 942 - DNA, 18 bp, Artificial Sequence
  Description of Artificial Sequence: Synthetic oligonucleotide
ggggatattccttcaaag

SEQ ID NO: 943 - DNA, 18 bp, Artificial Sequence
  Description of Artificial Sequence: Synthetic oligonucleotide
tggctggggatattcctt

SEQ ID NO: 944 - DNA, 18 bp, Artificial Sequence
  Description of Artificial Sequence: Synthetic oligonucleotide
ccagatggctggggatat

SEQ ID NO: 945 - DNA, 18 bp, Artificial Sequence
  Description of Artificial Sequence: Synthetic oligonucleotide
gtttgccagatggctggg

SEQ ID NO: 946 - DNA, 18 bp, Artificial Sequence
  Description of Artificial Sequence: Synthetic oligonucleotide
gtgaggtttgccagatgg

SEQ ID NO: 947 - DNA, 18 bp, Artificial Sequence
  Description of Artificial Sequence: Synthetic oligonucleotide
cttcggtgaggtttgcca

SEQ ID NO: 948 - DNA, 18 bp, Artificial Sequence
  Description of Artificial Sequence: Synthetic oligonucleotide
accctcttcggtgaggtt

SEQ ID NO: 949 - DNA, 18 bp, Artificial Sequence
  Description of Artificial Sequence: Synthetic oligonucleotide
ggtcaaccctcttcggtg

SEQ ID NO: 950 - DNA, 18 bp, Artificial Sequence
  Description of Artificial Sequence: Synthetic oligonucleotide
agtggggtcaaccctctt

SEQ ID NO: 951 - DNA, 18 bp, Artificial Sequence
  Description of Artificial Sequence: Synthetic oligonucleotide
cgctcagtggggtcaacc

SEQ ID NO: 952 - DNA, 18 bp, Artificial Sequence
  Description of Artificial Sequence: Synthetic oligonucleotide
cttcacgctcagtggggt

SEQ ID NO: 953 - DNA, 18 bp, Artificial Sequence
  Description of Artificial Sequence: Synthetic oligonucleotide
tctttcttcacgctcagt

SEQ ID NO: 954 - DNA, 18 bp, Artificial Sequence
  Description of Artificial Sequence: Synthetic oligonucleotide
aatcttctttcttcacgc

SEQ ID NO: 955 - DNA, 18 bp, Artificial Sequence
  Description of Artificial Sequence: Synthetic oligonucleotide
cttggaatcttctttctt

SEQ ID NO: 956 - DNA, 18 bp, Artificial Sequence
  Description of Artificial Sequence: Synthetic oligonucleotide
tgttccttggaatcttct

SEQ ID NO: 957 - DNA, 18 bp, Artificial Sequence
  Description of Artificial Sequence: Synthetic oligonucleotide
caggttgttccttggaat

SEQ ID NO: 958 - DNA, 18 bp, Artificial Sequence
  Description of Artificial Sequence: Synthetic oligonucleotide
gagatcaggttgttcctt

SEQ ID NO: 959 - DNA, 18 bp, Artificial Sequence
  Description of Artificial Sequence: Synthetic oligonucleotide
gaggggagatcaggttgt

SEQ ID NO: 960 - DNA, 18 bp, Artificial Sequence
  Description of Artificial Sequence: Synthetic oligonucleotide
ccaaggaggggagatcag

SEQ ID NO: 961 - DNA, 18 bp, Artificial Sequence
  Description of Artificial Sequence: Synthetic oligonucleotide
aggtgccaaggaggggag

SEQ ID NO: 962 - DNA, 18 bp, Artificial Sequence
  Description of Artificial Sequence: Synthetic oligonucleotide
ctcggaggtgccaaggag

SEQ ID NO: 963 - DNA, 18 bp, Artificial Sequence
  Description of Artificial Sequence: Synthetic oligonucleotide
gagagctcggaggtgcca

SEQ ID NO: 964 - DNA, 18 bp, Artificial Sequence
  Description of Artificial Sequence: Synthetic oligonucleotide
aggcagagagctcggagg

SEQ ID NO: 965 - DNA, 18 bp, Artificial Sequence
  Description of Artificial Sequence: Synthetic oligonucleotide
gacagaggcagagagctc

SEQ ID NO: 966 - DNA, 18 bp, Artificial Sequence
  Description of Artificial Sequence: Synthetic oligonucleotide
tttctgacagaggcagag

SEQ ID NO: 967 - DNA, 18 bp, Artificial Sequence
  Description of Artificial Sequence: Synthetic oligonucleotide
ggacgtttctgacagagg

SEQ ID NO: 968 - DNA, 18 bp, Artificial Sequence
  Description of Artificial Sequence: Synthetic oligonucleotide
ctggaggacgtttctgac

SEQ ID NO: 969 - DNA, 18 bp, Artificial Sequence
  Description of Artificial Sequence: Synthetic oligonucleotide
ctggtctggaggacgttt

SEQ ID NO: 970 - DNA, 18 bp, Artificial Sequence
  Description of Artificial Sequence: Synthetic oligonucleotide
cttggctggtctggagga

SEQ ID NO: 971 - DNA, 18 bp, Artificial Sequence
  Description of Artificial Sequence: Synthetic oligonucleotide
tgtgacttggctggtctg

SEQ ID NO: 972 - DNA, 18 bp, Artificial Sequence
  Description of Artificial Sequence: Synthetic oligonucleotide
cttcttgtgacttggctg

SEQ ID NO: 973 - DNA, 18 bp, Artificial Sequence
  Description of Artificial Sequence: Synthetic oligonucleotide
cgtaccttcttgtgactt

SEQ ID NO: 974 - DNA, 18 bp, Artificial Sequence
  Description of Artificial Sequence: Synthetic oligonucleotide
gagtccgtaccttcttgt

SEQ ID NO: 975 - DNA, 18 bp, Artificial Sequence
  Description of Artificial Sequence: Synthetic oligonucleotide
tctttgagtccgtacctt

SEQ ID NO: 976 - DNA, 18 bp, Artificial Sequence
  Description of Artificial Sequence: Synthetic oligonucleotide
ccttctttgagtccgtac

SEQ ID NO: 977 - DNA, 18 bp, Artificial Sequence
  Description of Artificial Sequence: Synthetic oligonucleotide
cagtaccttctttgagtc

SEQ ID NO: 978 - DNA, 18 bp, Artificial Sequence
  Description of Artificial Sequence: Synthetic oligonucleotide
aactgcagtaccttcttt

SEQ ID NO: 979 - DNA, 18 bp, Artificial Sequence
  Description of Artificial Sequence: Synthetic oligonucleotide
tggggaactgcagtacct

SEQ ID NO: 980 - DNA, 18 bp, Artificial Sequence
  Description of Artificial Sequence: Synthetic oligonucleotide
gaggctggggaactgcag

SEQ ID NO: 981 - DNA, 18 bp, Artificial Sequence
  Description of Artificial Sequence: Synthetic oligonucleotide
gtgtggaggctggggaac

SEQ ID NO: 982 - DNA, 18 bp, Artificial Sequence
  Description of Artificial Sequence: Synthetic oligonucleotide
tggttgtgtggaggctgg

SEQ ID NO: 983 - DNA, 18 bp, Artificial Sequence
  Description of Artificial Sequence: Synthetic oligonucleotide
attagtggttgtgtggag

SEQ ID NO: 984 - DNA, 18 bp, Artificial Sequence
  Description of Artificial Sequence: Synthetic oligonucleotide
ctgacattagtggttgtg

SEQ ID NO: 985 - DNA, 18 bp, Artificial Sequence
  Description of Artificial Sequence: Synthetic oligonucleotide
accaactgacattagtgg

SEQ ID NO: 986 - DNA, 18 bp, Artificial Sequence
  Description of Artificial Sequence: Synthetic oligonucleotide
atagcaccaactgacatt

SEQ ID NO: 987 - DNA, 18 bp, Artificial Sequence
  Description of Artificial Sequence: Synthetic oligonucleotide
tttaaatagcaccaactg

SEQ ID NO: 988 - DNA, 18 bp, Artificial Sequence
  Description of Artificial Sequence: Synthetic oligonucleotide
tgtagtttaaatagcacc

SEQ ID NO: 989 - DNA, 18 bp, Artificial Sequence
  Description of Artificial Sequence: Synthetic oligonucleotide
cttaatgtagtttaaata

SEQ ID NO: 990 - DNA, 18 bp, Artificial Sequence
  Description of Artificial Sequence: Synthetic oligonucleotide
tttggcttaatgtagttt

SEQ ID NO: 991 - DNA, 18 bp, Artificial Sequence
  Description of Artificial Sequence: Synthetic oligonucleotide
tgtgatttggcttaatgt

SEQ ID NO: 992 - DNA, 18 bp, Artificial Sequence
  Description of Artificial Sequence: Synthetic oligonucleotide
ctggatgtgatttggctt

SEQ ID NO: 993 - DNA, 18 bp, Artificial Sequence
  Description of Artificial Sequence: Synthetic oligonucleotide
gcatgctggatgtgattt

SEQ ID NO: 994 - DNA, 18 bp, Artificial Sequence
  Description of Artificial Sequence: Synthetic oligonucleotide
tatctgcatgctggatgt

SEQ ID NO: 995 - DNA, 18 bp, Artificial Sequence
  Description of Artificial Sequence: Synthetic oligonucleotide
cctcctatctgcatgctg

SEQ ID NO: 996 - DNA, 18 bp, Artificial Sequence
  Description of Artificial Sequence: Synthetic oligonucleotide
agaggacctcctatctgc

SEQ ID NO: 997 - DNA, 18 bp, Artificial Sequence
  Description of Artificial Sequence: Synthetic oligonucleotide
taaacagaggacctccta

SEQ ID NO: 998 - DNA, 18 bp, Artificial Sequence
  Description of Artificial Sequence: Synthetic oligonucleotide
cagcgtaaacagaggacc

SEQ ID NO: 999 - DNA, 18 bp, Artificial Sequence
  Description of Artificial Sequence: Synthetic oligonucleotide
ccaaccagcgtaaacaga

SEQ ID NO: 1000 - DNA, 18 bp, Artificial Sequence
  Description of Artificial Sequence: Synthetic oligonucleotide
atgcaccaaccagcgtaa

SEQ ID NO: 1001 - DNA, 18 bp, Artificial Sequence
  Description of Artificial Sequence: Synthetic oligonucleotide
aacttatgcaccaaccag

SEQ ID NO: 1002 - DNA, 18 bp, Artificial Sequence
  Description of Artificial Sequence: Synthetic oligonucleotide
gtacaaacttatgcacca

SEQ ID NO: 1003 - DNA, 18 bp, Artificial Sequence
  Description of Artificial Sequence: Synthetic oligonucleotide
gggttgtacaaacttatg

SEQ ID NO: 1004 - DNA, 18 bp, Artificial Sequence
  Description of Artificial Sequence: Synthetic oligonucleotide
ggttggggttgtacaaac

SEQ ID NO: 1005 - DNA, 18 bp, Artificial Sequence
  Description of Artificial Sequence: Synthetic oligonucleotide
cggaaggttggggttgta

SEQ ID NO: 1006 - DNA, 18 bp, Artificial Sequence
  Description of Artificial Sequence: Synthetic oligonucleotide
acccccggaaggttgggg

SEQ ID NO: 1007 - DNA, 18 bp, Artificial Sequence
  Description of Artificial Sequence: Synthetic oligonucleotide
tggaaacccccggaaggt

SEQ ID NO: 1008 - DNA, 18 bp, Artificial Sequence
  Description of Artificial Sequence: Synthetic oligonucleotide
tttagtggaaacccccgg

SEQ ID NO: 1009 - DNA, 18 bp, Artificial Sequence
  Description of Artificial Sequence: Synthetic oligonucleotide
gcagctttagtggaaacc

SEQ ID NO: 1010 - DNA, 18 bp, Artificial Sequence
  Description of Artificial Sequence: Synthetic oligonucleotide
acaaagcagctttagtgg

SEQ ID NO: 1011 - DNA, 18 bp, Artificial Sequence
  Description of Artificial Sequence: Synthetic oligonucleotide
gagggacaaagcagcttt

SEQ ID NO: 1012 - DNA, 18 bp, Artificial Sequence
  Description of Artificial Sequence: Synthetic oligonucleotide
ctcaggagggacaaagca

SEQ ID NO: 1013 - DNA, 18 bp, Artificial Sequence
  Description of Artificial Sequence: Synthetic oligonucleotide
gacctcaggagggacaaa

SEQ ID NO: 1014 - DNA, 18 bp, Artificial Sequence
  Description of Artificial Sequence: Synthetic oligonucleotide
gcttagacctcaggaggg

SEQ ID NO: 1015 - DNA, 18 bp, Artificial Sequence
  Description of Artificial Sequence: Synthetic oligonucleotide
tttctgcttagacctcag

SEQ ID NO: 1016 - DNA, 18 bp, Artificial Sequence
  Description of Artificial Sequence: Synthetic oligonucleotide
ctcactttctgcttagac

SEQ ID NO: 1017 - DNA, 18 bp, Artificial Sequence
  Description of Artificial Sequence: Synthetic oligonucleotide
ctttgctcactttctgct

SEQ ID NO: 1018 - DNA, 18 bp, Artificial Sequence
  Description of Artificial Sequence: Synthetic oligonucleotide
tgtctctttgctcacttt

SEQ ID NO: 1019 - DNA, 18 bp, Artificial Sequence
  Description of Artificial Sequence: Synthetic oligonucleotide
gtgtatgtctctttgctc

SEQ ID NO: 1020 - DNA, 18 bp, Artificial Sequence
  Description of Artificial Sequence: Synthetic oligonucleotide
ccatggtgtatgtctctt

SEQ ID NO: 1021 - DNA, 18 bp, Artificial Sequence
  Description of Artificial Sequence: Synthetic oligonucleotide
tgtggccatggtgtatgt

SEQ ID NO: 1022 - DNA, 18 bp, Artificial Sequence
  Description of Artificial Sequence: Synthetic oligonucleotide
ggagctgtggccatggtg

SEQ ID NO: 1023 - DNA, 18 bp, Artificial Sequence
  Description of Artificial Sequence: Synthetic oligonucleotide
gatgcggagctgtggcca

SEQ ID NO: 1024 - DNA, 18 bp, Artificial Sequence
  Description of Artificial Sequence: Synthetic oligonucleotide
ctcaggatgcggagctgt

SEQ ID NO: 1025 - DNA, 18 bp, Artificial Sequence
  Description of Artificial Sequence: Synthetic oligonucleotide
cctgcctcaggatgcgga

SEQ ID NO: 1026 - DNA, 18 bp, Artificial Sequence
  Description of Artificial Sequence: Synthetic oligonucleotide
gccttcctgcctcaggat

SEQ ID NO: 1027 - DNA, 18 bp, Artificial Sequence
  Description of Artificial Sequence: Synthetic oligonucleotide
cacaagccttcctgcctc

SEQ ID NO: 1028 - DNA, 18 bp, Artificial Sequence
  Description of Artificial Sequence: Synthetic oligonucleotide
catgccgcctgctgggct

SEQ ID NO: 1029 - DNA, 18 bp, Artificial Sequence
  Description of Artificial Sequence: Synthetic oligonucleotide
tgtgtcatgccgcctgct

SEQ ID NO: 1030 - DNA, 18 bp, Artificial Sequence
  Description of Artificial Sequence: Synthetic oligonucleotide
ggttctgtgtcatgccgc

SEQ ID NO: 1031 - DNA, 18 bp, Artificial Sequence
  Description of Artificial Sequence: Synthetic oligonucleotide
ccttgggttctgtgtcat

SEQ ID NO: 1032 - DNA, 18 bp, Artificial Sequence
  Description of Artificial Sequence: Synthetic oligonucleotide
tttggccttgggttctgt

SEQ ID NO: 1033 - DNA, 18 bp, Artificial Sequence
  Description of Artificial Sequence: Synthetic oligonucleotide
gcacatttggccttgggt

SEQ ID NO: 1034 - DNA, 18 bp, Artificial Sequence
  Description of Artificial Sequence: Synthetic oligonucleotide
ggggggcacatttggcct

SEQ ID NO: 1035 - DNA, 18 bp, Artificial Sequence
  Description of Artificial Sequence: Synthetic oligonucleotide
tttctggggggcacattt

SEQ ID NO: 1036 - DNA, 18 bp, Artificial Sequence
  Description of Artificial Sequence: Synthetic oligonucleotide
cgccttttctggggggca

SEQ ID NO: 1037 - DNA, 18 bp, Artificial Sequence
  Description of Artificial Sequence: Synthetic oligonucleotide
gagtgcgccttttctggg

SEQ ID NO: 1038 - DNA, 18 bp, Artificial Sequence
  Description of Artificial Sequence: Synthetic oligonucleotide
ctcttgagtgcgcctttt

SEQ ID NO: 1039 - DNA, 18 bp, Artificial Sequence
  Description of Artificial Sequence: Synthetic oligonucleotide
ctgagctcttgagtgcgc

SEQ ID NO: 1040 - DNA, 18 bp, Artificial Sequence
  Description of Artificial Sequence: Synthetic oligonucleotide
ctcctctgagctcttgag

SEQ ID NO: 1041 - DNA, 18 bp, Artificial Sequence
  Description of Artificial Sequence: Synthetic oligonucleotide
ccttcctcctctgagctc

SEQ ID NO: 1042 - DNA, 18 bp, Artificial Sequence
  Description of Artificial Sequence: Synthetic oligonucleotide
gagcaccttcctcctctg

SEQ ID NO: 1043 - DNA, 18 bp, Artificial Sequence
  Description of Artificial Sequence: Synthetic oligonucleotide
ccggagagcaccttcctc

SEQ ID NO: 1044 - DNA, 18 bp, Artificial Sequence
  Description of Artificial Sequence: Synthetic oligonucleotide
accagccggagagcacct

SEQ ID NO: 1045 - DNA, 18 bp, Artificial Sequence
  Description of Artificial Sequence: Synthetic oligonucleotide
ctagaaccagccggagag

SEQ ID NO: 1046 - DNA, 18 bp, Artificial Sequence
  Description of Artificial Sequence: Synthetic oligonucleotide
ggcggctagaaccagccg

SEQ ID NO: 1047 - DNA, 18 bp, Artificial Sequence
  Description of Artificial Sequence: Synthetic oligonucleotide
gccagggcggctagaacc

SEQ ID NO: 1048 - DNA, 18 bp, Artificial Sequence
  Description of Artificial Sequence: Synthetic oligonucleotide
gcactgccagggcggcta

SEQ ID NO: 1049 - DNA, 18 bp, Artificial Sequence
  Description of Artificial Sequence: Synthetic oligonucleotide
cccgggcactgccagggc

SEQ ID NO: 1050 - DNA, 18 bp, Artificial Sequence
  Description of Artificial Sequence: Synthetic oligonucleotide
ctccccccgggcactgcc

SEQ ID NO: 1051 - DNA, 18 bp, Artificial Sequence
  Description of Artificial Sequence: Synthetic oligonucleotide
accgcctccccccgggca

SEQ ID NO: 1052 - DNA, 18 bp, Artificial Sequence
  Description of Artificial Sequence: Synthetic oligonucleotide
catggaccgcctcccccc

SEQ ID NO: 1053 - DNA, 18 bp, Artificial Sequence
  Description of Artificial Sequence: Synthetic oligonucleotide
cccagcatggaccgcctc

SEQ ID NO: 1054 - DNA, 18 bp, Artificial Sequence
  Description of Artificial Sequence: Synthetic oligonucleotide
ttctgcccagcatggacc

SEQ ID NO: 1055 - DNA, 18 bp, Artificial Sequence
  Description of Artificial Sequence: Synthetic oligonucleotide
gaggattctgcccagcat

SEQ ID NO: 1056 - DNA, 18 bp, Artificial Sequence
  Description of Artificial Sequence: Synthetic oligonucleotide
gtggggaggattctgccc

SEQ ID NO: 1057 - DNA, 18 bp, Artificial Sequence
  Description of Artificial Sequence: Synthetic oligonucleotide
cgatggtggggaggattc

SEQ ID NO: 1058 - DNA, 18 bp, Artificial Sequence
  Description of Artificial Sequence: Synthetic oligonucleotide
gtgtacgatggtggggag

SEQ ID NO: 1059 - DNA, 18 bp, Artificial Sequence
  Description of Artificial Sequence: Synthetic oligonucleotide
tcttggtgtacgatggtg

SEQ ID NO: 1060 - DNA, 18 bp, Artificial Sequence
  Description of Artificial Sequence: Synthetic oligonucleotide
ttgtttcttggtgtacga

SEQ ID NO: 1061 - DNA, 18 bp, Artificial Sequence
  Description of Artificial Sequence: Synthetic oligonucleotide
tcactttgtttcttggtg

SEQ ID NO: 1062 - DNA, 18 bp, Artificial Sequence
  Description of Artificial Sequence: Synthetic oligonucleotide
ttgtgtcactttgtttct

SEQ ID NO: 1063 - DNA, 18 bp, Artificial Sequence
  Description of Artificial Sequence: Synthetic oligonucleotide
ttggcttgtgtcactttg

SEQ ID NO: 1064 - DNA, 18 bp, Artificial Sequence
  Description of Artificial Sequence: Synthetic oligonucleotide
tgagcttggcttgtgtca

SEQ ID NO: 1065 - DNA, 18 bp, Artificial Sequence
  Description of Artificial Sequence: Synthetic oligonucleotide
tcctgtgagcttggcttg

SEQ ID NO: 1066 - DNA, 18 bp, Artificial Sequence
  Description of Artificial Sequence: Synthetic oligonucleotide
agccctcctgtgagcttg

SEQ ID NO: 1067 - DNA, 18 bp, Artificial Sequence
  Description of Artificial Sequence: Synthetic oligonucleotide
aatagagccctcctgtga

SEQ ID NO: 1068 - DNA, 18 bp, Artificial Sequence
  Description of Artificial Sequence: Synthetic oligonucleotide
atgtgaatagagccctcc

SEQ ID NO: 1069 - DNA, 18 bp, Artificial Sequence
  Description of Artificial Sequence: Synthetic oligonucleotide
ggcaaatgtgaatagagc

SEQ ID NO: 1070 - DNA, 18 bp, Artificial Sequence
  Description of Artificial Sequence: Synthetic oligonucleotide
tctgtggcaaatgtgaat

SEQ ID NO: 1071 - DNA, 18 bp, Artificial Sequence
  Description of Artificial Sequence: Synthetic oligonucleotide
tgtgctctgtggcaaatg

SEQ ID NO: 1072 - DNA, 18 bp, Artificial Sequence
  Description of Artificial Sequence: Synthetic oligonucleotide
tcctctgtgctctgtggc

SEQ ID NO: 1073 - DNA, 18 bp, Artificial Sequence
  Description of Artificial Sequence: Synthetic oligonucleotide
tcaactcctctgtgctct

SEQ ID NO: 1074 - DNA, 18 bp, Artificial Sequence
  Description of Artificial Sequence: Synthetic oligonucleotide
tgacctcaactcctctgt

SEQ ID NO: 1075 - DNA, 18 bp, Artificial Sequence
  Description of Artificial Sequence: Synthetic oligonucleotide
gctcctgacctcaactcc

SEQ ID NO: 1076 - DNA, 18 bp, Artificial Sequence
  Description of Artificial Sequence: Synthetic oligonucleotide
tcctagctcctgacctca

SEQ ID NO: 1077 - DNA, 18 bp, Artificial Sequence
  Description of Artificial Sequence: Synthetic oligonucleotide
cagcctcctagctcctga

SEQ ID NO: 1078 - DNA, 18 bp, Artificial Sequence
  Description of Artificial Sequence: Synthetic oligonucleotide
gtctccagcctcctagct

SEQ ID NO: 1079 - DNA, 18 bp, Artificial Sequence
  Description of Artificial Sequence: Synthetic oligonucleotide
tagatgtctccagcctcc

SEQ ID NO: 1080 - DNA, 18 bp, Artificial Sequence
  Description of Artificial Sequence: Synthetic oligonucleotide
cagggtagatgtctccag

SEQ ID NO: 1081 - DNA, 18 bp, Artificial Sequence
  Description of Artificial Sequence: Synthetic oligonucleotide
tcggacagggtagatgtc

SEQ ID NO: 1082 - DNA, 18 bp, Artificial Sequence
  Description of Artificial Sequence: Synthetic oligonucleotide
agtcctcggacagggtag

SEQ ID NO: 1083 - DNA, 18 bp, Artificial Sequence
  Description of Artificial Sequence: Synthetic oligonucleotide
ctgaaagtcctcggacag

SEQ ID NO: 1084 - DNA, 18 bp, Artificial Sequence
  Description of Artificial Sequence: Synthetic oligonucleotide
gatacctgaaagtcctcg

SEQ ID NO: 1085 - DNA, 18 bp, Artificial Sequence
  Description of Artificial Sequence: Synthetic oligonucleotide
ccttagatacctgaaagt

SEQ ID NO: 1086 - DNA, 18 bp, Artificial Sequence
  Description of Artificial Sequence: Synthetic oligonucleotide
agtctccttagatacctg

SEQ ID NO: 1087 - DNA, 18 bp, Artificial Sequence
  Description of Artificial Sequence: Synthetic oligonucleotide
atcagtctccttagatac

SEQ ID NO: 1088 - DNA, 18 bp, Artificial Sequence
  Description of Artificial Sequence: Synthetic oligonucleotide
gctggatcagtctcctta

SEQ ID NO: 1089 - DNA, 18 bp, Artificial Sequence
  Description of Artificial Sequence: Synthetic oligonucleotide
caggtgctggatcagtct

SEQ ID NO: 1090 - DNA, 18 bp, Artificial Sequence
  Description of Artificial Sequence: Synthetic oligonucleotide
gggaccaggtgctggatc

SEQ ID NO: 1091 - DNA, 18 bp, Artificial Sequence
  Description of Artificial Sequence: Synthetic oligonucleotide
gagaggggaccaggtgct

SEQ ID NO: 1092 - DNA, 18 bp, Artificial Sequence
  Description of Artificial Sequence: Synthetic oligonucleotide
gcccagagaggggaccag

SEQ ID NO: 1093 - DNA, 18 bp, Artificial Sequence
  Description of Artificial Sequence: Synthetic oligonucleotide
actctgcccagagagggg

SEQ ID NO: 1094 - DNA, 18 bp, Artificial Sequence
  Description of Artificial Sequence: Synthetic oligonucleotide
ttcacactctgcccagag

SEQ ID NO: 1095 - DNA, 18 bp, Artificial Sequence
  Description of Artificial Sequence: Synthetic oligonucleotide
caatattcacactctgcc

SEQ ID NO: 1096 - DNA, 18 bp, Artificial Sequence
  Description of Artificial Sequence: Synthetic oligonucleotide
aaggtcaatattcacact

SEQ ID NO: 1097 - DNA, 18 bp, Artificial Sequence
  Description of Artificial Sequence: Synthetic oligonucleotide
gggagaaggtcaatattc

SEQ ID NO: 1098 - DNA, 18 bp, Artificial Sequence
  Description of Artificial Sequence: Synthetic oligonucleotide
ctacggggagaaggtcaa

SEQ ID NO: 1099 - DNA, 18 bp, Artificial Sequence
  Description of Artificial Sequence: Synthetic oligonucleotide
gctctacggggagaaggt

SEQ ID NO: 1100 - DNA, 18 bp, Artificial Sequence
  Description of Artificial Sequence: Synthetic oligonucleotide
tcggagctctacggggag

SEQ ID NO: 1101 - DNA, 18 bp, Artificial Sequence
  Description of Artificial Sequence: Synthetic oligonucleotide
tgcagtcggagctctacg

SEQ ID NO: 1102 - DNA, 18 bp, Artificial Sequence
  Description of Artificial Sequence: Synthetic oligonucleotide
ttatctgcagtcggagct

SEQ ID NO: 1103 - DNA, 18 bp, Artificial Sequence
  Description of Artificial Sequence: Synthetic oligonucleotide
ctgaattatctgcagtcg

SEQ ID NO: 1104 - DNA, 18 bp, Artificial Sequence
  Description of Artificial Sequence: Synthetic oligonucleotide
tctctctgaattatctgc

SEQ ID NO: 1105 - DNA, 18 bp, Artificial Sequence
  Description of Artificial Sequence: Synthetic oligonucleotide
ttcgttctctctgaatta

SEQ ID NO: 1106 - DNA, 18 bp, Artificial Sequence
  Description of Artificial Sequence: Synthetic oligonucleotide
cctccttcgttctctctg

SEQ ID NO: 1107 - DNA, 18 bp, Artificial Sequence
  Description of Artificial Sequence: Synthetic oligonucleotide
tccttcctccttcgttct

SEQ ID NO: 1108 - DNA, 18 bp, Artificial Sequence
  Description of Artificial Sequence: Synthetic oligonucleotide
acagctccttcctccttc

SEQ ID NO: 1109 - DNA, 18 bp, Artificial Sequence
  Description of Artificial Sequence: Synthetic oligonucleotide
gcgaaacagctccttcct

SEQ ID NO: 1110 - DNA, 18 bp, Artificial Sequence
  Description of Artificial Sequence: Synthetic oligonucleotide
tttttgcgaaacagctcc

SEQ ID NO: 1111 - DNA, 18 bp, Artificial Sequence
  Description of Artificial Sequence: Synthetic oligonucleotide
tgttctttttgcgaaaca

SEQ ID NO: 1112 - DNA, 18 bp, Artificial Sequence
  Description of Artificial Sequence: Synthetic oligonucleotide
tgccttgttctttttgcg

SEQ ID NO: 1113 - DNA, 18 bp, Artificial Sequence
  Description of Artificial Sequence: Synthetic oligonucleotide
cccgcatgattctggtgg

SEQ ID NO: 1114 - DNA, 18 bp, Artificial Sequence
  Description of Artificial Sequence: Synthetic oligonucleotide
agacacccgcatgattct

SEQ ID NO: 1115 - DNA, 18 bp, Artificial Sequence
  Description of Artificial Sequence: Synthetic oligonucleotide
gtgtgagacacccgcatg

SEQ ID NO: 1116 - DNA, 18 bp, Artificial Sequence
  Description of Artificial Sequence: Synthetic oligonucleotide
ggaaggtgtgagacaccc

SEQ ID NO: 1117 - DNA, 18 bp, Artificial Sequence
  Description of Artificial Sequence: Synthetic oligonucleotide
gacagggaaggtgtgaga

SEQ ID NO: 1118 - DNA, 18 bp, Artificial Sequence
  Description of Artificial Sequence: Synthetic oligonucleotide
tctacgacagggaaggtg

SEQ ID NO: 1119 - DNA, 18 bp, Artificial Sequence
  Description of Artificial Sequence: Synthetic oligonucleotide
tgcagtctacgacaggga

SEQ ID NO: 1120 - DNA, 18 bp, Artificial Sequence
  Description of Artificial Sequence: Synthetic oligonucleotide
ggccgtgcagtctacgac

SEQ ID NO: 1121 - DNA, 18 bp, Artificial Sequence
  Description of Artificial Sequence: Synthetic oligonucleotide
caagcggccgtgcagtct

SEQ ID NO: 1122 - DNA, 18 bp, Artificial Sequence
  Description of Artificial Sequence: Synthetic oligonucleotide
cacagcaagcggccgtgc

SEQ ID NO: 1123 - DNA, 18 bp, Artificial Sequence
  Description of Artificial Sequence: Synthetic oligonucleotide
caggtcacagcaagcggc

SEQ ID NO: 1124 - DNA, 18 bp, Artificial Sequence
  Description of Artificial Sequence: Synthetic oligonucleotide
ctggacaggtcacagcaa

SEQ ID NO: 1125 - DNA, 18 bp, Artificial Sequence
  Description of Artificial Sequence: Synthetic oligonucleotide
cacagctggacaggtcac

SEQ ID NO: 1126 - DNA, 18 bp, Artificial Sequence
  Description of Artificial Sequence: Synthetic oligonucleotide
caggtcacagctggacag

SEQ ID NO: 1127 - DNA, 18 bp, Artificial Sequence
  Description of Artificial Sequence: Synthetic oligonucleotide
caggccaggtcacagctg

SEQ ID NO: 1128 - DNA, 18 bp, Artificial Sequence
  Description of Artificial Sequence: Synthetic oligonucleotide
accaccaggccaggtcac

SEQ ID NO: 1129 - DNA, 18 bp, Artificial Sequence
  Description of Artificial Sequence: Synthetic oligonucleotide
ctcgaaccaccaggccag

SEQ ID NO: 1130 - DNA, 18 bp, Artificial Sequence
  Description of Artificial Sequence: Synthetic oligonucleotide
cggccctcgaaccaccag

SEQ ID NO: 1131 - DNA, 18 bp, Artificial Sequence
  Description of Artificial Sequence: Synthetic oligonucleotide
agcagcggccctcgaacc

SEQ ID NO: 1132 - DNA, 18 bp, Artificial Sequence
  Description of Artificial Sequence: Synthetic oligonucleotide
caggtagcagcggccctc

SEQ ID NO: 1133 - DNA, 18 bp, Artificial Sequence
  Description of Artificial Sequence: Synthetic oligonucleotide
ctcaccaggtagcagcgg

SEQ ID NO: 1134 - DNA, 18 bp, Artificial Sequence
  Description of Artificial Sequence: Synthetic oligonucleotide
ggcagctcaccaggtagc

SEQ ID NO: 1135 - DNA, 18 bp, Artificial Sequence
  Description of Artificial Sequence: Synthetic oligonucleotide
gtgggggcagctcaccag

SEQ ID NO: 1136 - DNA, 18 bp, Artificial Sequence
  Description of Artificial Sequence: Synthetic oligonucleotide
tttgtgggggcagctcac

SEQ ID NO: 1137 - DNA, 18 bp, Artificial Sequence
  Description of Artificial Sequence: Synthetic oligonucleotide
ttctctttgtgggggcag

SEQ ID NO: 1138 - DNA, 18 bp, Artificial Sequence
  Description of Artificial Sequence: Synthetic oligonucleotide
cacagttctctttgtggg

SEQ ID NO: 1139 - DNA, 18 bp, Artificial Sequence
  Description of Artificial Sequence: Synthetic oligonucleotide
gggctcacagttctcttt

SEQ ID NO: 1140 - DNA, 18 bp, Artificial Sequence
  Description of Artificial Sequence: Synthetic oligonucleotide
ttcttgggctcacagttc

SEQ ID NO: 1141 - DNA, 18 bp, Artificial Sequence
  Description of Artificial Sequence: Synthetic oligonucleotide
ccatcttcttgggctcac

SEQ ID NO: 1142 - DNA, 18 bp, Artificial Sequence
  Description of Artificial Sequence: Synthetic oligonucleotide
ggggcccatcttcttggg

SEQ ID NO: 1143 - DNA, 18 bp, Artificial Sequence
  Description of Artificial Sequence: Synthetic oligonucleotide
ctgatggggcccatcttc

SEQ ID NO: 1144 - DNA, 18 bp, Artificial Sequence
  Description of Artificial Sequence: Synthetic oligonucleotide
aagacctgatggggccca

SEQ ID NO: 1145 - DNA, 18 bp, Artificial Sequence
  Description of Artificial Sequence: Synthetic oligonucleotide
gagataagacctgatggg

SEQ ID NO: 1146 - DNA, 18 bp, Artificial Sequence
  Description of Artificial Sequence: Synthetic oligonucleotide
aaagtgagataagacctg

SEQ ID NO: 1147 - DNA, 18 bp, Artificial Sequence
  Description of Artificial Sequence: Synthetic oligonucleotide
gcacaaaagtgagataag

SEQ ID NO: 1148 - DNA, 18 bp, Artificial Sequence
  Description of Artificial Sequence: Synthetic oligonucleotide
ccggagcacaaaagtgag

SEQ ID NO: 1149 - DNA, 18 bp, Artificial Sequence
  Description of Artificial Sequence: Synthetic oligonucleotide
acaggccggagcacaaaa

SEQ ID NO: 1150 - DNA, 18 bp, Artificial Sequence
  Description of Artificial Sequence: Synthetic oligonucleotide
tctgaacaggccggagca

SEQ ID NO: 1151 - DNA, 18 bp, Artificial Sequence
  Description of Artificial Sequence: Synthetic oligonucleotide
aggcctctgaacaggccg

SEQ ID NO: 1152 - DNA, 18 bp, Artificial Sequence
  Description of Artificial Sequence: Synthetic oligonucleotide
tgtgcaggcctctgaaca

SEQ ID NO: 1153 - DNA, 18 bp, Artificial Sequence
  Description of Artificial Sequence: Synthetic oligonucleotide
gcagctgtgcaggcctct

SEQ ID NO: 1154 - DNA, 18 bp, Artificial Sequence
  Description of Artificial Sequence: Synthetic oligonucleotide
gtccagcagctgtgcagg

SEQ ID NO: 1155 - DNA, 18 bp, Artificial Sequence
  Description of Artificial Sequence: Synthetic oligonucleotide
tccccatagtccagcagc

SEQ ID NO: 1156 - DNA, 18 bp, Artificial Sequence
  Description of Artificial Sequence: Synthetic oligonucleotide
tcatgtccccatagtcca

SEQ ID NO: 1157 - DNA, 18 bp, Artificial Sequence
  Description of Artificial Sequence: Synthetic oligonucleotide
cagcatcatgtccccata

SEQ ID NO: 1158 - DNA, 18 bp, Artificial Sequence
  Description of Artificial Sequence: Synthetic oligonucleotide
ctgttcagcatcatgtcc

SEQ ID NO: 1159 - DNA, 18 bp, Artificial Sequence
  Description of Artificial Sequence: Synthetic oligonucleotide
agcccctgttcagcatca

SEQ ID NO: 1160 - DNA, 18 bp, Artificial Sequence
  Description of Artificial Sequence: Synthetic oligonucleotide
gggggagcccctgttcag

SEQ ID NO: 1161 - DNA, 18 bp, Artificial Sequence
  Description of Artificial Sequence: Synthetic oligonucleotide
cccgagggggagcccctg

SEQ ID NO: 1162 - DNA, 18 bp, Artificial Sequence
  Description of Artificial Sequence: Synthetic oligonucleotide
agatccccgagggggagc

SEQ ID NO: 1163 - DNA, 18 bp, Artificial Sequence
  Description of Artificial Sequence: Synthetic oligonucleotide
cccccagatccccgaggg

SEQ ID NO: 1164 - DNA, 18 bp, Artificial Sequence
  Description of Artificial Sequence: Synthetic oligonucleotide
gagtccccccagatcccc

SEQ ID NO: 1165 - DNA, 18 bp, Artificial Sequence
  Description of Artificial Sequence: Synthetic oligonucleotide
caggtgagtccccccaga

SEQ ID NO: 1166 - DNA, 18 bp, Artificial Sequence
  Description of Artificial Sequence: Synthetic oligonucleotide
atcctcaggtgagtcccc

SEQ ID NO: 1167 - DNA, 18 bp, Artificial Sequence
  Description of Artificial Sequence: Synthetic oligonucleotide
ctgatatcctcaggtgag

SEQ ID NO: 1168 - DNA, 18 bp, Artificial Sequence
  Description of Artificial Sequence: Synthetic oligonucleotide
cctttctgatatcctcag

SEQ ID NO: 1169 - DNA, 18 bp, Artificial Sequence
  Description of Artificial Sequence: Synthetic oligonucleotide
caagtcctttctgatatc

SEQ ID NO: 1170 - DNA, 18 bp, Artificial Sequence
  Description of Artificial Sequence: Synthetic oligonucleotide
aaggtcaagtcctttctg

SEQ ID NO: 1171 - DNA, 18 bp, Artificial Sequence
  Description of Artificial Sequence: Synthetic oligonucleotide
ctagaaaggtcaagtcct

SEQ ID NO: 1172 - DNA, 18 bp, Artificial Sequence
  Description of Artificial Sequence: Synthetic oligonucleotide
tgcctagaaaggtcaagt

SEQ ID NO: 1173 - DNA, 18 bp, Artificial Sequence
  Description of Artificial Sequence: Synthetic oligonucleotide
atctttgcctagaaaggt

SEQ ID NO: 1174 - DNA, 18 bp, Artificial Sequence
  Description of Artificial Sequence: Synthetic oligonucleotide
ccccaatctttgcctaga

SEQ ID NO: 1175 - DNA, 18 bp, Artificial Sequence
  Description of Artificial Sequence: Synthetic oligonucleotide
ctaggccccaatctttgc

SEQ ID NO: 1176 - DNA, 18 bp, Artificial Sequence
  Description of Artificial Sequence: Synthetic oligonucleotide
ctcctctaggccccaatc

SEQ ID NO: 1177 - DNA, 18 bp, Artificial Sequence
  Description of Artificial Sequence: Synthetic oligonucleotide
gacatctcctctaggccc

SEQ ID NO: 1178 - DNA, 18 bp, Artificial Sequence
  Description of Artificial Sequence: Synthetic oligonucleotide
actcagacatctcctcta

SEQ ID NO: 1179 - DNA, 18 bp, Artificial Sequence
  Description of Artificial Sequence: Synthetic oligonucleotide
tgagtactcagacatctc

SEQ ID NO: 1180 - DNA, 18 bp, Artificial Sequence
  Description of Artificial Sequence: Synthetic oligonucleotide
tcatctgagtactcagac

SEQ ID NO: 1181 - DNA, 18 bp, Artificial Sequence
  Description of Artificial Sequence: Synthetic oligonucleotide
ggtagtcatctgagtact

SEQ ID NO: 1182 - DNA, 18 bp, Artificial Sequence
  Description of Artificial Sequence: Synthetic oligonucleotide
ctcccggtagtcatctga

SEQ ID NO: 1183 - DNA, 18 bp, Artificial Sequence
  Description of Artificial Sequence: Synthetic oligonucleotide
tccagctcccggtagtca

SEQ ID NO: 1184 - DNA, 18 bp, Artificial Sequence
  Description of Artificial Sequence: Synthetic oligonucleotide
ccttctccagctcccggt

SEQ ID NO: 1185 - DNA, 18 bp, Artificial Sequence
  Description of Artificial Sequence: Synthetic oligonucleotide
gaggtccttctccagctc

SEQ ID NO: 1186 - DNA, 18 bp, Artificial Sequence
  Description of Artificial Sequence: Synthetic oligonucleotide
tgcaagaggtccttctcc

SEQ ID NO: 1187 - DNA, 18 bp, Artificial Sequence
  Description of Artificial Sequence: Synthetic oligonucleotide
tgggttgcaagaggtcct

SEQ ID NO: 1188 - DNA, 18 bp, Artificial Sequence
  Description of Artificial Sequence: Synthetic oligonucleotide
gccactgggttgcaagag

SEQ ID NO: 1189 - DNA, 18 bp, Artificial Sequence
  Description of Artificial Sequence: Synthetic oligonucleotide
tgcttgccactgggttgc

SEQ ID NO: 1190 - DNA, 18 bp, Artificial Sequence
  Description of Artificial Sequence: Synthetic oligonucleotide
gctcctgcttgccactgg

SEQ ID NO: 1191 - DNA, 18 bp, Artificial Sequence
  Description of Artificial Sequence: Synthetic oligonucleotide
tctgggctcctgcttgcc

SEQ ID NO: 1192 - DNA, 18 bp, Artificial Sequence
  Description of Artificial Sequence: Synthetic oligonucleotide
ctccctctgggctcctgc

SEQ ID NO: 1193 - DNA, 18 bp, Artificial Sequence
  Description of Artificial Sequence: Synthetic oligonucleotide
cggcactccctctgggct

SEQ ID NO: 1194 - DNA, 18 bp, Artificial Sequence
  Description of Artificial Sequence: Synthetic oligonucleotide
gtactcggcactccctct

SEQ ID NO: 1195 - DNA, 18 bp, Artificial Sequence
  Description of Artificial Sequence: Synthetic oligonucleotide
tccgtgtactcggcactc

SEQ ID NO: 1196 - DNA, 18 bp, Artificial Sequence
  Description of Artificial Sequence: Synthetic oligonucleotide
cccagtccgtgtactcgg

SEQ ID NO: 1197 - DNA, 18 bp, Artificial Sequence
  Description of Artificial Sequence: Synthetic oligonucleotide
taggccccagtccgtgta

SEQ ID NO: 1198 - DNA, 18 bp, Artificial Sequence
  Description of Artificial Sequence: Synthetic oligonucleotide
ggcagtaggccccagtcc

SEQ ID NO: 1199 - DNA, 18 bp, Artificial Sequence
  Description of Artificial Sequence: Synthetic oligonucleotide
tgcccggcagtaggcccc

SEQ ID NO: 1200 - DNA, 18 bp, Artificial Sequence
  Description of Artificial Sequence: Synthetic oligonucleotide
ctcgctgcccggcagtag

SEQ ID NO: 1201 - DNA, 18 bp, Artificial Sequence
  Description of Artificial Sequence: Synthetic oligonucleotide
gccccctcgctgcccggc

SEQ ID NO: 1202 - DNA, 18 bp, Artificial Sequence
  Description of Artificial Sequence: Synthetic oligonucleotide
tgaaggccccctcgctgc

SEQ ID NO: 1203 - DNA, 18 bp, Artificial Sequence
  Description of Artificial Sequence: Synthetic oligonucleotide
ggagttgaaggccccctc

SEQ ID NO: 1204 - DNA, 18 bp, Artificial Sequence
  Description of Artificial Sequence: Synthetic oligonucleotide
acagaggagttgaaggcc

SEQ ID NO: 1205 - DNA, 18 bp, Artificial Sequence
  Description of Artificial Sequence: Synthetic oligonucleotide
ctccaacagaggagttga

SEQ ID NO: 1206 - DNA, 18 bp, Artificial Sequence
  Description of Artificial Sequence: Synthetic oligonucleotide
actgtctccaacagagga

SEQ ID NO: 1207 - DNA, 18 bp, Artificial Sequence
  Description of Artificial Sequence: Synthetic oligonucleotide
gcaggactgtctccaaca

SEQ ID NO: 1208 - DNA, 18 bp, Artificial Sequence
  Description of Artificial Sequence: Synthetic oligonucleotide
gcaccgcaggactgtctc

SEQ ID NO: 1209 - DNA, 18 bp, Artificial Sequence
  Description of Artificial Sequence: Synthetic oligonucleotide
cgctggcaccgcaggact

SEQ ID NO: 1210 - DNA, 18 bp, Artificial Sequence
  Description of Artificial Sequence: Synthetic oligonucleotide
gtctccgctggcaccgca

SEQ ID NO: 1211 - DNA, 18 bp, Artificial Sequence
  Description of Artificial Sequence: Synthetic oligonucleotide
gctgcgtctccgctggca

SEQ ID NO: 1212 - DNA, 18 bp, Artificial Sequence
  Description of Artificial Sequence: Synthetic oligonucleotide
gtcctgctgcgtctccgc

SEQ ID NO: 1213 - DNA, 18 bp, Artificial Sequence
  Description of Artificial Sequence: Synthetic oligonucleotide
gccctgtttgtacggaca

SEQ ID NO: 1214 - DNA, 18 bp, Artificial Sequence
  Description of Artificial Sequence: Synthetic oligonucleotide
ccctggccctgtttgtac

SEQ ID NO: 1215 - DNA, 18 bp, Artificial Sequence
  Description of Artificial Sequence: Synthetic oligonucleotide
gatgtccctggccctgtt

SEQ ID NO: 1216 - DNA, 18 bp, Artificial Sequence
  Description of Artificial Sequence: Synthetic oligonucleotide
cggcggatgtccctggcc

SEQ ID NO: 1217 - DNA, 18 bp, Artificial Sequence
  Description of Artificial Sequence: Synthetic oligonucleotide
ggtatcggcggatgtccc

SEQ ID NO: 1218 - DNA, 18 bp, Artificial Sequence
  Description of Artificial Sequence: Synthetic oligonucleotide
ctctaggtatcggcggat

SEQ ID NO: 1219 - DNA, 18 bp, Artificial Sequence
  Description of Artificial Sequence: Synthetic oligonucleotide
atggtctctaggtatcgg

SEQ ID NO: 1220 - DNA, 18 bp, Artificial Sequence
  Description of Artificial Sequence: Synthetic oligonucleotide
ctagaatggtctctaggt

SEQ ID NO: 1221 - DNA, 18 bp, Artificial Sequence
  Description of Artificial Sequence: Synthetic oligonucleotide
gatctctagaatggtctc

SEQ ID NO: 1222 - DNA, 18 bp, Artificial Sequence
  Description of Artificial Sequence: Synthetic oligonucleotide
gctttgatctctagaatg

SEQ ID NO: 1223 - DNA, 18 bp, Artificial Sequence
  Description of Artificial Sequence: Synthetic oligonucleotide
gaaatgctttgatctcta

SEQ ID NO: 1224 - DNA, 18 bp, Artificial Sequence
  Description of Artificial Sequence: Synthetic oligonucleotide
aaagggaaatgctttgat

SEQ ID NO: 1225 - DNA, 18 bp, Artificial Sequence
  Description of Artificial Sequence: Synthetic oligonucleotide
ttataaaagggaaatgct

SEQ ID NO: 1226 - DNA, 18 bp, Artificial Sequence
  Description of Artificial Sequence: Synthetic oligonucleotide
cagtattataaaagggaa

SEQ ID NO: 1227 - DNA, 18 bp, Artificial Sequence
  Description of Artificial Sequence: Synthetic oligonucleotide
acagacagtattataaaa

SEQ ID NO: 1228 - DNA, 18 bp, Artificial Sequence
  Description of Artificial Sequence: Synthetic oligonucleotide
aatatacagacagtatta

SEQ ID NO: 1229 - DNA, 18 bp, Artificial Sequence
  Description of Artificial Sequence: Synthetic oligonucleotide
tccgtaatatacagacag

SEQ ID NO: 1230 - DNA, 18 bp, Artificial Sequence
  Description of Artificial Sequence: Synthetic oligonucleotide
gagcttccgtaatataca

SEQ ID NO: 1231 - DNA, 18 bp, Artificial Sequence
  Description of Artificial Sequence: Synthetic oligonucleotide
gaaaagagcttccgtaat

SEQ ID NO: 1232 - DNA, 18 bp, Artificial Sequence
  Description of Artificial Sequence: Synthetic oligonucleotide
tatgtgaaaagagcttcc

SEQ ID NO: 1233 - DNA, 18 bp, Artificial Sequence
  Description of Artificial Sequence: Synthetic oligonucleotide
catattatgtgaaaagag

SEQ ID NO: 1234 - DNA, 18 bp, Artificial Sequence
  Description of Artificial Sequence: Synthetic oligonucleotide
cgagtcatattatgtgaa

SEQ ID NO: 1235 - DNA, 18 bp, Artificial Sequence
  Description of Artificial Sequence: Synthetic oligonucleotide
gcagacgagtcatattat

SEQ ID NO: 1236 - DNA, 18 bp, Artificial Sequence
  Description of Artificial Sequence: Synthetic oligonucleotide
ctttcgcagacgagtcat

SEQ ID NO: 1237 - DNA, 18 bp, Artificial Sequence
  Description of Artificial Sequence: Synthetic oligonucleotide
ataaactttcgcagacga

SEQ ID NO: 1238 - DNA, 18 bp, Artificial Sequence
  Description of Artificial Sequence: Synthetic oligonucleotide
aaaccataaactttcgca

SEQ ID NO: 1239 - DNA, 18 bp, Artificial Sequence
  Description of Artificial Sequence: Synthetic oligonucleotide
aaagtaaaccataaactt

SEQ ID NO: 1240 - DNA, 18 bp, Artificial Sequence
  Description of Artificial Sequence: Synthetic oligonucleotide
tttccaaagtaaaccata

SEQ ID NO: 1241 - DNA, 18 bp, Artificial Sequence
  Description of Artificial Sequence: Synthetic oligonucleotide
ggttctttccaaagtaaa

SEQ ID NO: 1242 - DNA, 18 bp, Artificial Sequence
  Description of Artificial Sequence: Synthetic oligonucleotide
actttggttctttccaaa

SEQ ID NO: 1243 - DNA, 18 bp, Artificial Sequence
  Description of Artificial Sequence: Synthetic oligonucleotide
tgcaaactttggttcttt

SEQ ID NO: 1244 - DNA, 18 bp, Artificial Sequence
  Description of Artificial Sequence: Synthetic oligonucleotide
tcttctgcaaactttggt

SEQ ID NO: 1245 - DNA, 18 bp, Artificial Sequence
  Description of Artificial Sequence: Synthetic oligonucleotide
ctgtatcttctgcaaact

SEQ ID NO: 1246 - DNA, 18 bp, Artificial Sequence
  Description of Artificial Sequence: Synthetic oligonucleotide
gttttctgtatcttctgc

SEQ ID NO: 1247 - DNA, 18 bp, Artificial Sequence
  Description of Artificial Sequence: Synthetic oligonucleotide
gaggagttttctgtatct

SEQ ID NO: 1248 - DNA, 18 bp, Artificial Sequence
  Description of Artificial Sequence: Synthetic oligonucleotide
aaagagaggagttttctg

SEQ ID NO: 1249 - DNA, 18 bp, Artificial Sequence
  Description of Artificial Sequence: Synthetic oligonucleotide
gccacaaagagaggagtt

SEQ ID NO: 1250 - DNA, 18 bp, Artificial Sequence
  Description of Artificial Sequence: Synthetic oligonucleotide
tcgccgccacaaagagag

SEQ ID NO: 1251 - DNA, 18 bp, Artificial Sequence
  Description of Artificial Sequence: Synthetic oligonucleotide
acagatcgccgccacaaa

SEQ ID NO: 1252 - DNA, 18 bp, Artificial Sequence
  Description of Artificial Sequence: Synthetic oligonucleotide
tgagcacagatcgccgcc

SEQ ID NO: 1253 - DNA, 18 bp, Artificial Sequence
  Description of Artificial Sequence: Synthetic oligonucleotide
accaatgagcacagatcg

SEQ ID NO: 1254 - DNA, 18 bp, Artificial Sequence
  Description of Artificial Sequence: Synthetic oligonucleotide
ctgaaaccaatgagcaca

SEQ ID NO: 1255 - DNA, 18 bp, Artificial Sequence
  Description of Artificial Sequence: Synthetic oligonucleotide
ggatactgaaaccaatga

SEQ ID NO: 1256 - DNA, 18 bp, Artificial Sequence
  Description of Artificial Sequence: Synthetic oligonucleotide
caaaaggatactgaaacc

SEQ ID NO: 1257 - DNA, 18 bp, Artificial Sequence
  Description of Artificial Sequence: Synthetic oligonucleotide
tgggtcaaaaggatactg

SEQ ID NO: 1258 - DNA, 18 bp, Artificial Sequence
  Description of Artificial Sequence: Synthetic oligonucleotide
aaggatgggtcaaaagga

SEQ ID NO: 1259 - DNA, 18 bp, Artificial Sequence
  Description of Artificial Sequence: Synthetic oligonucleotide
catcaaaggatgggtcaa

SEQ ID NO: 1260 - DNA, 18 bp, Artificial Sequence
  Description of Artificial Sequence: Synthetic oligonucleotide
cacatcatcaaaggatgg

SEQ ID NO: 1261 - DNA, 18 bp, Artificial Sequence
  Description of Artificial Sequence: Synthetic oligonucleotide
acagccacatcatcaaag

SEQ ID NO: 1262 - DNA, 18 bp, Artificial Sequence
  Description of Artificial Sequence: Synthetic oligonucleotide
tgaaaacagccacatcat

SEQ ID NO: 1263 - DNA, 18 bp, Artificial Sequence
  Description of Artificial Sequence: Synthetic oligonucleotide
ggacttgaaaacagccac

SEQ ID NO: 1264 - DNA, 18 bp, Artificial Sequence
  Description of Artificial Sequence: Synthetic oligonucleotide
atataggacttgaaaaca

SEQ ID NO: 1265 - DNA, 18 bp, Artificial Sequence
  Description of Artificial Sequence: Synthetic oligonucleotide
gttccatataggacttga

SEQ ID NO: 1266 - DNA, 18 bp, Artificial Sequence
  Description of Artificial Sequence: Synthetic oligonucleotide
aaggcgttccatatagga

SEQ ID NO: 1267 - DNA, 18 bp, Artificial Sequence
  Description of Artificial Sequence: Synthetic oligonucleotide
aaggaaaggcgttccata

SEQ ID NO: 1268 - DNA, 18 bp, Artificial Sequence
  Description of Artificial Sequence: Synthetic oligonucleotide
tccttaaggaaaggcgtt

SEQ ID NO: 1269 - DNA, 18 bp, Artificial Sequence
  Description of Artificial Sequence: Synthetic oligonucleotide
tttgttccttaaggaaag

SEQ ID NO: 1270 - DNA, 18 bp, Artificial Sequence
  Description of Artificial Sequence: Synthetic oligonucleotide
gtcgctttgttccttaag

SEQ ID NO: 1271 - DNA, 18 bp, Artificial Sequence
  Description of Artificial Sequence: Synthetic oligonucleotide
cagctgtcgctttgttcc

SEQ ID NO: 1272 - DNA, 18 bp, Artificial Sequence
  Description of Artificial Sequence: Synthetic oligonucleotide
aatttcagctgtcgcttt

SEQ ID NO: 1273 - DNA, 18 bp, Artificial Sequence
  Description of Artificial Sequence: Synthetic oligonucleotide
ttgagaatttcagctgtc

SEQ ID NO: 1274 - DNA, 18 bp, Artificial Sequence
  Description of Artificial Sequence: Synthetic oligonucleotide
ttgctttgagaatttcag

SEQ ID NO: 1275 - DNA, 18 bp, Artificial Sequence
  Description of Artificial Sequence: Synthetic oligonucleotide
cacagttgctttgagaat

SEQ ID NO: 1276 - DNA, 18 bp, Artificial Sequence
  Description of Artificial Sequence: Synthetic oligonucleotide
gaggacacagttgctttg

SEQ ID NO: 1277 - DNA, 18 bp, Artificial Sequence
  Description of Artificial Sequence: Synthetic oligonucleotide
cacaggaggacacagttg

SEQ ID NO: 1278 - DNA, 18 bp, Artificial Sequence
  Description of Artificial Sequence: Synthetic oligonucleotide
ctcaccacaggaggacac

SEQ ID NO: 1279 - DNA, 18 bp, Artificial Sequence
  Description of Artificial Sequence: Synthetic oligonucleotide
gccagctcaccacaggag

SEQ ID NO: 1280 - DNA, 18 bp, Artificial Sequence
  Description of Artificial Sequence: Synthetic oligonucleotide
tcaaggccagctcaccac

SEQ ID NO: 1281 - DNA, 18 bp, Artificial Sequence
  Description of Artificial Sequence: Synthetic oligonucleotide
ccctttcaaggccagctc

SEQ ID NO: 1282 - DNA, 18 bp, Artificial Sequence
  Description of Artificial Sequence: Synthetic oligonucleotide
aaaaaccctttcaaggcc

SEQ ID NO: 1283 - DNA, 18 bp, Artificial Sequence
  Description of Artificial Sequence: Synthetic oligonucleotide
atgaaaaaaaccctttca

SEQ ID NO: 1284 - DNA, 18 bp, Artificial Sequence
  Description of Artificial Sequence: Synthetic oligonucleotide
gcaacatgaaaaaaaccc

SEQ ID NO: 1285 - DNA, 18 bp, Artificial Sequence
  Description of Artificial Sequence: Synthetic oligonucleotide
tcaaagcaacatgaaaaa

SEQ ID NO: 1286 - DNA, 18 bp, Artificial Sequence
  Description of Artificial Sequence: Synthetic oligonucleotide
taaactcaaagcaacatg

SEQ ID NO: 1287 - DNA, 18 bp, Artificial Sequence
  Description of Artificial Sequence: Synthetic oligonucleotide
atcattaaactcaaagca

SEQ ID NO: 1288 - DNA, 18 bp, Artificial Sequence
  Description of Artificial Sequence: Synthetic oligonucleotide
tcatcatcattaaactca

SEQ ID NO: 1289 - DNA, 18 bp, Artificial Sequence
  Description of Artificial Sequence: Synthetic oligonucleotide
cgagatcatcatcattaa

SEQ ID NO: 1290 - DNA, 18 bp, Artificial Sequence
  Description of Artificial Sequence: Synthetic oligonucleotide
ttctgcgagatcatcatc

SEQ ID NO: 1291 - DNA, 18 bp, Artificial Sequence
  Description of Artificial Sequence: Synthetic oligonucleotide
cctgcttctgcgagatca

SEQ ID NO: 1292 - DNA, 18 bp, Artificial Sequence
  Description of Artificial Sequence: Synthetic oligonucleotide
caacccctgcttctgcga

SEQ ID NO: 1293 - DNA, 18 bp, Artificial Sequence
  Description of Artificial Sequence: Synthetic oligonucleotide
ttcatcaacccctgcttc

SEQ ID NO: 1294 - DNA, 18 bp, Artificial Sequence
  Description of Artificial Sequence: Synthetic oligonucleotide
tcatcttcatcaacccct

SEQ ID NO: 1295 - DNA, 18 bp, Artificial Sequence
  Description of Artificial Sequence: Synthetic oligonucleotide
gatcttcatcttcatcaa

SEQ ID NO: 1296 - DNA, 18 bp, Artificial Sequence
  Description of Artificial Sequence: Synthetic oligonucleotide
ggttagatcttcatcttc

SEQ ID NO: 1297 - DNA, 18 bp, Artificial Sequence
  Description of Artificial Sequence: Synthetic oligonucleotide
cacatggttagatcttca

SEQ ID NO: 1298 - DNA, 18 bp, Artificial Sequence
  Description of Artificial Sequence: Synthetic oligonucleotide
tcaagcacatggttagat

SEQ ID NO: 1299 - DNA, 18 bp, Artificial Sequence
  Description of Artificial Sequence: Synthetic oligonucleotide
gctcatcaagcacatggt

SEQ ID NO: 1300 - DNA, 18 bp, Artificial Sequence
  Description of Artificial Sequence: Synthetic oligonucleotide
aatttgctcatcaagcac

SEQ ID NO: 1301 - DNA, 18 bp, Artificial Sequence
  Description of Artificial Sequence: Synthetic oligonucleotide
ctgtaaatttgctcatca

SEQ ID NO: 1302 - DNA, 18 bp, Artificial Sequence
  Description of Artificial Sequence: Synthetic oligonucleotide
ctgggctgtaaatttgct

SEQ ID NO: 1303 - DNA, 18 bp, Artificial Sequence
  Description of Artificial Sequence: Synthetic oligonucleotide
agtctctgggctgtaaat

SEQ ID NO: 1304 - DNA, 18 bp, Artificial Sequence
  Description of Artificial Sequence: Synthetic oligonucleotide
gtcttagtctctgggctg

SEQ ID NO: 1305 - DNA, 18 bp, Artificial Sequence
  Description of Artificial Sequence: Synthetic oligonucleotide
gaatggtcttagtctctg

SEQ ID NO: 1306 - DNA, 18 bp, Artificial Sequence
  Description of Artificial Sequence: Synthetic oligonucleotide
cggtagaatggtcttagt

SEQ ID NO: 1307 - DNA, 18 bp, Artificial Sequence
  Description of Artificial Sequence: Synthetic oligonucleotide
aaaaccggtagaatggtc

SEQ ID NO: 1308 - DNA, 18 bp, Artificial Sequence
  Description of Artificial Sequence: Synthetic oligonucleotide
acttaaaaaccggtagaa

SEQ ID NO: 1309 - DNA, 18 bp, Artificial Sequence
  Description of Artificial Sequence: Synthetic oligonucleotide
gcaggacttaaaaaccgg

SEQ ID NO: 1310 - DNA, 18 bp, Artificial Sequence
  Description of Artificial Sequence: Synthetic oligonucleotide
ggaaggcaggacttaaaa

SEQ ID NO: 1311 - DNA, 18 bp, Artificial Sequence
  Description of Artificial Sequence: Synthetic oligonucleotide
ttcttggaaggcaggact

SEQ ID NO: 1312 - DNA, 18 bp, Artificial Sequence
  Description of Artificial Sequence: Synthetic oligonucleotide
agaaattcttggaaggca

SEQ ID NO: 1313 - DNA, 18 bp, Artificial Sequence
  Description of Artificial Sequence: Synthetic oligonucleotide
ccgcaagaaattcttgga

SEQ ID NO: 1314 - DNA, 18 bp, Artificial Sequence
  Description of Artificial Sequence: Synthetic oligonucleotide
catccccgcaagaaattc

SEQ ID NO: 1315 - DNA, 18 bp, Artificial Sequence
  Description of Artificial Sequence: Synthetic oligonucleotide
agcctcatccccgcaaga

SEQ ID NO: 1316 - DNA, 18 bp, Artificial Sequence
  Description of Artificial Sequence: Synthetic oligonucleotide
caatcagcctcatccccg

SEQ ID NO: 1317 - DNA, 18 bp, Artificial Sequence
  Description of Artificial Sequence: Synthetic oligonucleotide
gagttcaatcagcctcat

SEQ ID NO: 1318 - DNA, 18 bp, Artificial Sequence
  Description of Artificial Sequence: Synthetic oligonucleotide
tccaggagttcaatcagc

SEQ ID NO: 1319 - DNA, 18 bp, Artificial Sequence
  Description of Artificial Sequence: Synthetic oligonucleotide
ctgaatccaggagttcaa

SEQ ID NO: 1320 - DNA, 18 bp, Artificial Sequence
  Description of Artificial Sequence: Synthetic oligonucleotide
cctatctgaatccaggag

SEQ ID NO: 1321 - DNA, 18 bp, Artificial Sequence
  Description of Artificial Sequence: Synthetic oligonucleotide
tcctgcctatctgaatcc

SEQ ID NO: 1322 - DNA, 18 bp, Artificial Sequence
  Description of Artificial Sequence: Synthetic oligonucleotide
gatgttcctgcctatctg

SEQ ID NO: 1323 - DNA, 18 bp, Artificial Sequence
  Description of Artificial Sequence: Synthetic oligonucleotide
atcttgatgttcctgcct

SEQ ID NO: 1324 - DNA, 18 bp, Artificial Sequence
  Description of Artificial Sequence: Synthetic oligonucleotide
cccaaatcttgatgttcc

SEQ ID NO: 1325 - DNA, 18 bp, Artificial Sequence
  Description of Artificial Sequence: Synthetic oligonucleotide
acagtcccaaatcttgat

SEQ ID NO: 1326 - DNA, 18 bp, Artificial Sequence
  Description of Artificial Sequence: Synthetic oligonucleotide
atgatacagtcccaaatc

SEQ ID NO: 1327 - DNA, 18 bp, Artificial Sequence
  Description of Artificial Sequence: Synthetic oligonucleotide
ttcaaatgatacagtccc

SEQ ID NO: 1328 - DNA, 18 bp, Artificial Sequence
  Description of Artificial Sequence: Synthetic oligonucleotide
tttgtttcaaatgataca

SEQ ID NO: 1329 - DNA, 18 bp, Artificial Sequence
  Description of Artificial Sequence: Synthetic oligonucleotide
gttgatttgtttcaaatg

SEQ ID NO: 1330 - DNA, 18 bp, Artificial Sequence
  Description of Artificial Sequence: Synthetic oligonucleotide
ggtgagttgatttgtttc

SEQ ID NO: 1331 - DNA, 18 bp, Artificial Sequence
  Description of Artificial Sequence: Synthetic oligonucleotide
tcatgggtgagttgattt

SEQ ID NO: 1332 - DNA, 18 bp, Artificial Sequence
  Description of Artificial Sequence: Synthetic oligonucleotide
agtcatcatgggtgagtt

SEQ ID NO: 1333 - DNA, 18 bp, Artificial Sequence
  Description of Artificial Sequence: Synthetic oligonucleotide
cttacagtcatcatgggt

SEQ ID NO: 1334 - DNA, 18 bp, Artificial Sequence
  Description of Artificial Sequence: Synthetic oligonucleotide
aggcgcttacagtcatca

SEQ ID NO: 1335 - DNA, 18 bp, Artificial Sequence
  Description of Artificial Sequence: Synthetic oligonucleotide
gttgtaggcgcttacagt

SEQ ID NO: 1336 - DNA, 18 bp, Artificial Sequence
  Description of Artificial Sequence: Synthetic oligonucleotide
attgttgtaggcgcttac

SEQ ID NO: 1337 - DNA, 18 bp, Artificial Sequence
  Description of Artificial Sequence: Synthetic oligonucleotide
aaaaaattgttgtaggcg

SEQ ID NO: 1338 - DNA, 18 bp, Artificial Sequence
  Description of Artificial Sequence: Synthetic oligonucleotide
agttcaaaaaattgttgt

SEQ ID NO: 1339 - DNA, 18 bp, Artificial Sequence
  Description of Artificial Sequence: Synthetic oligonucleotide
gacatagttcaaaaaatt

SEQ ID NO: 1340 - DNA, 18 bp, Artificial Sequence
  Description of Artificial Sequence: Synthetic oligonucleotide
ctggagacatagttcaaa

SEQ ID NO: 1341 - DNA, 18 bp, Artificial Sequence
  Description of Artificial Sequence: Synthetic oligonucleotide
ggaggctggagacatagt

SEQ ID NO: 1342 - DNA, 18 bp, Artificial Sequence
  Description of Artificial Sequence: Synthetic oligonucleotide
tgaagggaggctggagac

SEQ ID NO: 1343 - DNA, 18 bp, Artificial Sequence
  Description of Artificial Sequence: Synthetic oligonucleotide
tttgttgaagggaggctg

SEQ ID NO: 1344 - DNA, 18 bp, Artificial Sequence
  Description of Artificial Sequence: Synthetic oligonucleotide
ctgcttttgttgaaggga

SEQ ID NO: 1345 - DNA, 18 bp, Artificial Sequence
  Description of Artificial Sequence: Synthetic oligonucleotide
gggccctgcttttgttga

SEQ ID NO: 1346 - DNA, 18 bp, Artificial Sequence
  Description of Artificial Sequence: Synthetic oligonucleotide
attttgggccctgctttt

SEQ ID NO: 1347 - DNA, 18 bp, Artificial Sequence
  Description of Artificial Sequence: Synthetic oligonucleotide
acacaattttgggccctg

SEQ ID NO: 1348 - DNA, 18 bp, Artificial Sequence
  Description of Artificial Sequence: Synthetic oligonucleotide
atgagacacaattttggg

SEQ ID NO: 1349 - DNA, 18 bp, Artificial Sequence
  Description of Artificial Sequence: Synthetic oligonucleotide
agcaaatgagacacaatt

SEQ ID NO: 1350 - DNA, 18 bp, Artificial Sequence
  Description of Artificial Sequence: Synthetic oligonucleotide
aatggagcaaatgagaca

SEQ ID NO: 1351 - DNA, 18 bp, Artificial Sequence
  Description of Artificial Sequence: Synthetic oligonucleotide
cactaaatggagcaaatg

SEQ ID NO: 1352 - DNA, 18 bp, Artificial Sequence
  Description of Artificial Sequence: Synthetic oligonucleotide
ttatccactaaatggagc

SEQ ID NO: 1353 - DNA, 18 bp, Artificial Sequence
  Description of Artificial Sequence: Synthetic oligonucleotide
ctttgttatccactaaat

SEQ ID NO: 1354 - DNA, 18 bp, Artificial Sequence
  Description of Artificial Sequence: Synthetic oligonucleotide
tgactctttgttatccac

SEQ ID NO: 1355 - DNA, 18 bp, Artificial Sequence
  Description of Artificial Sequence: Synthetic oligonucleotide
tccaatgactctttgtta

SEQ ID NO: 1356 - DNA, 18 bp, Artificial Sequence
  Description of Artificial Sequence: Synthetic oligonucleotide
tattctccaatgactctt

SEQ ID NO: 1357 - DNA, 18 bp, Artificial Sequence
  Description of Artificial Sequence: Synthetic oligonucleotide
agatatattctccaatga

SEQ ID NO: 1358 - DNA, 18 bp, Artificial Sequence
  Description of Artificial Sequence: Synthetic oligonucleotide
ttttcagatatattctcc

SEQ ID NO: 1359 - DNA, 18 bp, Artificial Sequence
  Description of Artificial Sequence: Synthetic oligonucleotide
catcattttcagatatat

SEQ ID NO: 1360 - DNA, 18 bp, Artificial Sequence
  Description of Artificial Sequence: Synthetic oligonucleotide
gtagtcatcattttcaga

SEQ ID NO: 1361 - DNA, 18 bp, Artificial Sequence
  Description of Artificial Sequence: Synthetic oligonucleotide
tttaagtagtcatcattt

SEQ ID NO: 1362 - DNA, 18 bp, Artificial Sequence
  Description of Artificial Sequence: Synthetic oligonucleotide
ggtgctttaagtagtcat

SEQ ID NO: 1363 - DNA, 18 bp, Artificial Sequence
  Description of Artificial Sequence: Synthetic oligonucleotide
tggctggtgctttaagta

SEQ ID NO: 1364 - DNA, 18 bp, Artificial Sequence
  Description of Artificial Sequence: Synthetic oligonucleotide
atttctggctggtgcttt

SEQ ID NO: 1365 - DNA, 18 bp, Artificial Sequence
  Description of Artificial Sequence: Synthetic oligonucleotide
gtgaaatttctggctggt

SEQ ID NO: 1366 - DNA, 18 bp, Artificial Sequence
  Description of Artificial Sequence: Synthetic oligonucleotide
ctgcagtgaaatttctgg

SEQ ID NO: 1367 - DNA, 18 bp, Artificial Sequence
  Description of Artificial Sequence: Synthetic oligonucleotide
tgcatctgcagtgaaatt

SEQ ID NO: 1368 - DNA, 18 bp, Artificial Sequence
  Description of Artificial Sequence: Synthetic oligonucleotide
gtaactgcatctgcagtg

SEQ ID NO: 1369 - DNA, 18 bp, Artificial Sequence
  Description of Artificial Sequence: Synthetic oligonucleotide
cctaagtaactgcatctg

SEQ ID NO: 1370 - DNA, 18 bp, Artificial Sequence
  Description of Artificial Sequence: Synthetic oligonucleotide
aatcccctaagtaactgc

SEQ ID NO: 1371 - DNA, 18 bp, Artificial Sequence
  Description of Artificial Sequence: Synthetic oligonucleotide
gccacaatcccctaagta

SEQ ID NO: 1372 - DNA, 18 bp, Artificial Sequence
  Description of Artificial Sequence: Synthetic oligonucleotide
aatttgccacaatcccct

SEQ ID NO: 1373 - DNA, 18 bp, Artificial Sequence
  Description of Artificial Sequence: Synthetic oligonucleotide
ggacaaatttgccacaat

SEQ ID NO: 1374 - DNA, 18 bp, Artificial Sequence
  Description of Artificial Sequence: Synthetic oligonucleotide
cttgtggacaaatttgcc

SEQ ID NO: 1375 - DNA, 18 bp, Artificial Sequence
  Description of Artificial Sequence: Synthetic oligonucleotide
gtaagcttgtggacaaat

SEQ ID NO: 1376 - DNA, 18 bp, Artificial Sequence
  Description of Artificial Sequence: Synthetic oligonucleotide
gaaaagtaagcttgtgga

SEQ ID NO: 1377 - DNA, 18 bp, Artificial Sequence
  Description of Artificial Sequence: Synthetic oligonucleotide
ccattgaaaagtaagctt

SEQ ID NO: 1378 - DNA, 18 bp, Artificial Sequence
  Description of Artificial Sequence: Synthetic oligonucleotide
tgaaaccattgaaaagta

SEQ ID NO: 1379 - DNA, 18 bp, Artificial Sequence
  Description of Artificial Sequence: Synthetic oligonucleotide
tgttctgaaaccattgaa

SEQ ID NO: 1380 - DNA, 18 bp, Artificial Sequence
  Description of Artificial Sequence: Synthetic oligonucleotide
gtaaatgttctgaaacca

SEQ ID NO: 1381 - DNA, 18 bp, Artificial Sequence
  Description of Artificial Sequence: Synthetic oligonucleotide
aaccagtaaatgttctga

SEQ ID NO: 1382 - DNA, 18 bp, Artificial Sequence
  Description of Artificial Sequence: Synthetic oligonucleotide
gcaagaaccagtaaatgt

SEQ ID NO: 1383 - DNA, 18 bp, Artificial Sequence
  Description of Artificial Sequence: Synthetic oligonucleotide
tcagggcaagaaccagta

SEQ ID NO: 1384 - DNA, 18 bp, Artificial Sequence
  Description of Artificial Sequence: Synthetic oligonucleotide
agttttcagggcaagaac

SEQ ID NO: 1385 - DNA, 18 bp, Artificial Sequence
  Description of Artificial Sequence: Synthetic oligonucleotide
taagcagttttcagggca

SEQ ID NO: 1386 - DNA, 18 bp, Artificial Sequence
  Description of Artificial Sequence: Synthetic oligonucleotide
tttgataagcagttttca

SEQ ID NO: 1387 - DNA, 18 bp, Artificial Sequence
  Description of Artificial Sequence: Synthetic oligonucleotide
gttgctttgataagcagt

SEQ ID NO: 1388 - DNA, 18 bp, Artificial Sequence
  Description of Artificial Sequence: Synthetic oligonucleotide
acagtgttgctttgataa

SEQ ID NO: 1389 - DNA, 18 bp, Artificial Sequence
  Description of Artificial Sequence: Synthetic oligonucleotide
cagcaacagtgttgcttt

SEQ ID NO: 1390 - DNA, 18 bp, Artificial Sequence
  Description of Artificial Sequence: Synthetic oligonucleotide
acacgcagcaacagtgtt

SEQ ID NO: 1391 - DNA, 18 bp, Artificial Sequence
  Description of Artificial Sequence: Synthetic oligonucleotide
ggagaacacgcagcaaca

SEQ ID NO: 1392 - DNA, 18 bp, Artificial Sequence
  Description of Artificial Sequence: Synthetic oligonucleotide
caaatggagaacacgcag

SEQ ID NO: 1393 - DNA, 18 bp, Artificial Sequence
  Description of Artificial Sequence: Synthetic oligonucleotide
caaaacaaatggagaaca

SEQ ID NO: 1394 - DNA, 18 bp, Artificial Sequence
  Description of Artificial Sequence: Synthetic oligonucleotide
aattgcaaaacaaatgga

SEQ ID NO: 1395 - DNA, 18 bp, Artificial Sequence
  Description of Artificial Sequence: Synthetic oligonucleotide
gaaggaattgcaaaacaa

SEQ ID NO: 1396 - DNA, 18 bp, Artificial Sequence
  Description of Artificial Sequence: Synthetic oligonucleotide
cccttgaaggaattgcaa

SEQ ID NO: 1397 - DNA, 18 bp, Artificial Sequence
  Description of Artificial Sequence: Synthetic oligonucleotide
gttctcccttgaaggaat

SEQ ID NO: 1398 - DNA, 18 bp, Artificial Sequence
  Description of Artificial Sequence: Synthetic oligonucleotide
tcagtgttctcccttgaa

SEQ ID NO: 1399 - DNA, 18 bp, Artificial Sequence
  Description of Artificial Sequence: Synthetic oligonucleotide
caaagtcagtgttctccc

SEQ ID NO: 1400 - DNA, 18 bp, Artificial Sequence
  Description of Artificial Sequence: Synthetic oligonucleotide
gcacccaaagtcagtgtt

SEQ ID NO: 1401 - DNA, 18 bp, Artificial Sequence
  Description of Artificial Sequence: Synthetic oligonucleotide
taagcgcacccaaagtca

SEQ ID NO: 1402 - DNA, 18 bp, Artificial Sequence
  Description of Artificial Sequence: Synthetic oligonucleotide
taagttaagcgcacccaa

SEQ ID NO: 1403 - DNA, 18 bp, Artificial Sequence
  Description of Artificial Sequence: Synthetic oligonucleotide
tactgtaagttaagcgca

SEQ ID NO: 1404 - DNA, 18 bp, Artificial Sequence
  Description of Artificial Sequence: Synthetic oligonucleotide
aaaagtactgtaagttaa

SEQ ID NO: 1405 - DNA, 18 bp, Artificial Sequence
  Description of Artificial Sequence: Synthetic oligonucleotide
gtcgaaaaagtactgtaa

SEQ ID NO: 1406 - DNA, 18 bp, Artificial Sequence
  Description of Artificial Sequence: Synthetic oligonucleotide
gggtggtcgaaaaagtac

SEQ ID NO: 1407 - DNA, 18 bp, Artificial Sequence
  Description of Artificial Sequence: Synthetic oligonucleotide
tttctgggtggtcgaaaa

SEQ ID NO: 1408 - DNA, 18 bp, Artificial Sequence
  Description of Artificial Sequence: Synthetic oligonucleotide
caagctttctgggtggtc

SEQ ID NO: 1409 - DNA, 18 bp, Artificial Sequence
  Description of Artificial Sequence: Synthetic oligonucleotide
caatgacaagctttctgg

SEQ ID NO: 1410 - DNA, 18 bp, Artificial Sequence
  Description of Artificial Sequence: Synthetic oligonucleotide
ctcaacaatgacaagctt

SEQ ID NO: 1411 - DNA, 18 bp, Artificial Sequence
  Description of Artificial Sequence: Synthetic oligonucleotide
tgctcctcaacaatgaca

SEQ ID NO: 1412 - DNA, 18 bp, Artificial Sequence
  Description of Artificial Sequence: Synthetic oligonucleotide
gtggatgctcctcaacaa

SEQ ID NO: 1413 - DNA, 18 bp, Artificial Sequence
  Description of Artificial Sequence: Synthetic oligonucleotide
gggaagtggatgctcctc

SEQ ID NO: 1414 - DNA, 18 bp, Artificial Sequence
  Description of Artificial Sequence: Synthetic oligonucleotide
gtattgggaagtggatgc

SEQ ID NO: 1415 - DNA, 18 bp, Artificial Sequence
  Description of Artificial Sequence: Synthetic oligonucleotide
tcctcgtattgggaagtg

SEQ ID NO: 1416 - DNA, 18 bp, Artificial Sequence
  Description of Artificial Sequence: Synthetic oligonucleotide
ttatttcctcgtattggg

SEQ ID NO: 1417 - DNA, 18 bp, Artificial Sequence
  Description of Artificial Sequence: Synthetic oligonucleotide
atgtcttatttcctcgta

SEQ ID NO: 1418 - DNA, 18 bp, Artificial Sequence
  Description of Artificial Sequence: Synthetic oligonucleotide
gggtgatgtcttatttcc

SEQ ID NO: 1419 - DNA, 18 bp, Artificial Sequence
  Description of Artificial Sequence: Synthetic oligonucleotide
gctctgggtgatgtctta

SEQ ID NO: 1420 - DNA, 18 bp, Artificial Sequence
  Description of Artificial Sequence: Synthetic oligonucleotide
aatgtgctctgggtgatg

SEQ ID NO: 1421 - DNA, 18 bp, Artificial Sequence
  Description of Artificial Sequence: Synthetic oligonucleotide
tgaaaaatgtgctctggg

SEQ ID NO: 1422 - DNA, 18 bp, Artificial Sequence
  Description of Artificial Sequence: Synthetic oligonucleotide
agaactgaaaaatgtgct

SEQ ID NO: 1423 - DNA, 18 bp, Artificial Sequence
  Description of Artificial Sequence: Synthetic oligonucleotide
tttccagaactgaaaaat

SEQ ID NO: 1424 - DNA, 18 bp, Artificial Sequence
  Description of Artificial Sequence: Synthetic oligonucleotide
acatgtttccagaactga

SEQ ID NO: 1425 - DNA, 18 bp, Artificial Sequence
  Description of Artificial Sequence: Synthetic oligonucleotide
tcaaaacatgtttccaga

SEQ ID NO: 1426 - DNA, 18 bp, Artificial Sequence
  Description of Artificial Sequence: Synthetic oligonucleotide
atttgtcaaaacatgttt

SEQ ID NO: 1427 - DNA, 18 bp, Artificial Sequence
  Description of Artificial Sequence: Synthetic oligonucleotide
ctgtgatttgtcaaaaca

SEQ ID NO: 1428 - DNA, 18 bp, Artificial Sequence
  Description of Artificial Sequence: Synthetic oligonucleotide
ggcacctgtgatttgtca

SEQ ID NO: 1429 - DNA, 18 bp, Artificial Sequence
  Description of Artificial Sequence: Synthetic oligonucleotide
tagttggcacctgtgatt

SEQ ID NO: 1430 - DNA, 18 bp, Artificial Sequence
  Description of Artificial Sequence: Synthetic oligonucleotide
atctatagttggcacctg

SEQ ID NO: 1431 - DNA, 18 bp, Artificial Sequence
  Description of Artificial Sequence: Synthetic oligonucleotide
tcctgatctatagttggc

SEQ ID NO: 1432 - DNA, 18 bp, Artificial Sequence
  Description of Artificial Sequence: Synthetic oligonucleotide
catagtcctgatctatag

SEQ ID NO: 1433 - DNA, 18 bp, Artificial Sequence
  Description of Artificial Sequence: Synthetic oligonucleotide
agaagcatagtcctgatc

SEQ ID NO: 1434 - DNA, 18 bp, Artificial Sequence
  Description of Artificial Sequence: Synthetic oligonucleotide
aaggcagaagcatagtcc

SEQ ID NO: 1435 - DNA, 18 bp, Artificial Sequence
  Description of Artificial Sequence: Synthetic oligonucleotide
gttcaaaggcagaagcat

SEQ ID NO: 1436 - DNA, 18 bp, Artificial Sequence
  Description of Artificial Sequence: Synthetic oligonucleotide
cataggttcaaaggcaga

SEQ ID NO: 1437 - DNA, 18 bp, Artificial Sequence
  Description of Artificial Sequence: Synthetic oligonucleotide
tcattcataggttcaaag

SEQ ID NO: 1438 - DNA, 18 bp, Artificial Sequence
  Description of Artificial Sequence: Synthetic oligonucleotide
cccattcattcataggtt

SEQ ID NO: 1439 - DNA, 18 bp, Artificial Sequence
  Description of Artificial Sequence: Synthetic oligonucleotide
tcgctcccattcattcat

SEQ ID NO: 1440 - DNA, 18 bp, Artificial Sequence
  Description of Artificial Sequence: Synthetic oligonucleotide
aaatttcgctcccattca

SEQ ID NO: 1441 - DNA, 18 bp, Artificial Sequence
  Description of Artificial Sequence: Synthetic oligonucleotide
cagctaaatttcgctccc

SEQ ID NO: 1442 - DNA, 18 bp, Artificial Sequence
  Description of Artificial Sequence: Synthetic oligonucleotide
tttttcagctaaatttcg

SEQ ID NO: 1443 - DNA, 18 bp, Artificial Sequence
  Description of Artificial Sequence: Synthetic oligonucleotide
tcctctttttcagctaaa

SEQ ID NO: 1444 - DNA, 18 bp, Artificial Sequence
  Description of Artificial Sequence: Synthetic oligonucleotide
cattatcctctttttcag

SEQ ID NO: 1445 - DNA, 18 bp, Artificial Sequence
  Description of Artificial Sequence: Synthetic oligonucleotide
ctttacattatcctcttt

SEQ ID NO: 1446 - DNA, 18 bp, Artificial Sequence
  Description of Artificial Sequence: Synthetic oligonucleotide
tagctctttacattatcc

SEQ ID NO: 1447 - DNA, 18 bp, Artificial Sequence
  Description of Artificial Sequence: Synthetic oligonucleotide
ccatatagctctttacat

SEQ ID NO: 1448 - DNA, 18 bp, Artificial Sequence
  Description of Artificial Sequence: Synthetic oligonucleotide
catatccatatagctctt

SEQ ID NO: 1449 - DNA, 18 bp, Artificial Sequence
  Description of Artificial Sequence: Synthetic oligonucleotide
cgctgcatatccatatag

SEQ ID NO: 1450 - DNA, 18 bp, Artificial Sequence
  Description of Artificial Sequence: Synthetic oligonucleotide
ccctgcgctgcatatcca

SEQ ID NO: 1451 - DNA, 18 bp, Artificial Sequence
  Description of Artificial Sequence: Synthetic oligonucleotide
tgatgccctgcgctgcat

SEQ ID NO: 1452 - DNA, 18 bp, Artificial Sequence
  Description of Artificial Sequence: Synthetic oligonucleotide
tctggtgatgccctgcgc

SEQ ID NO: 1453 - DNA, 18 bp, Artificial Sequence
  Description of Artificial Sequence: Synthetic oligonucleotide
taaggtctggtgatgccc

SEQ ID NO: 1454 - DNA, 18 bp, Artificial Sequence
  Description of Artificial Sequence: Synthetic oligonucleotide
agtactaaggtctggtga

SEQ ID NO: 1455 - DNA, 18 bp, Artificial Sequence
  Description of Artificial Sequence: Synthetic oligonucleotide
tagccagtactaaggtct

SEQ ID NO: 1456 - DNA, 18 bp, Artificial Sequence
  Description of Artificial Sequence: Synthetic oligonucleotide
tccaatagccagtactaa

SEQ ID NO: 1457 - DNA, 18 bp, Artificial Sequence
  Description of Artificial Sequence: Synthetic oligonucleotide
aagtttccaatagccagt

SEQ ID NO: 1458 - DNA, 18 bp, Artificial Sequence
  Description of Artificial Sequence: Synthetic oligonucleotide
ggagaaagtttccaatag

SEQ ID NO: 1459 - DNA, 18 bp, Artificial Sequence
  Description of Artificial Sequence: Synthetic oligonucleotide
gctttggagaaagtttcc

SEQ ID NO: 1460 - DNA, 18 bp, Artificial Sequence
  Description of Artificial Sequence: Synthetic oligonucleotide
gtactgctttggagaaag

SEQ ID NO: 1461 - DNA, 18 bp, Artificial Sequence
  Description of Artificial Sequence: Synthetic oligonucleotide
atcttgtactgctttgga

SEQ ID NO: 1462 - DNA, 18 bp, Artificial Sequence
  Description of Artificial Sequence: Synthetic oligonucleotide
agggaatcttgtactgct

SEQ ID NO: 1463 - DNA, 18 bp, Artificial Sequence
  Description of Artificial Sequence: Synthetic oligonucleotide
tagacagggaatcttgta

SEQ ID NO: 1464 - DNA, 18 bp, Artificial Sequence
  Description of Artificial Sequence: Synthetic oligonucleotide
acttctagacagggaatc

SEQ ID NO: 1465 - DNA, 18 bp, Artificial Sequence
  Description of Artificial Sequence: Synthetic oligonucleotide
catcgacttctagacagg

SEQ ID NO: 1466 - DNA, 18 bp, Artificial Sequence
  Description of Artificial Sequence: Synthetic oligonucleotide
attcacatcgacttctag

SEQ ID NO: 1467 - DNA, 18 bp, Artificial Sequence
  Description of Artificial Sequence: Synthetic oligonucleotide
atatcattcacatcgact

SEQ ID NO: 1468 - DNA, 18 bp, Artificial Sequence
  Description of Artificial Sequence: Synthetic oligonucleotide
catcaatatcattcacat

SEQ ID NO: 1469 - DNA, 18 bp, Artificial Sequence
  Description of Artificial Sequence: Synthetic oligonucleotide
tacaacatcaatatcatt

SEQ ID NO: 1470 - DNA, 18 bp, Artificial Sequence
  Description of Artificial Sequence: Synthetic oligonucleotide
tggcctacaacatcaata

SEQ ID NO: 1471 - DNA, 18 bp, Artificial Sequence
  Description of Artificial Sequence: Synthetic oligonucleotide
tatcctggcctacaacat

SEQ ID NO: 1472 - DNA, 18 bp, Artificial Sequence
  Description of Artificial Sequence: Synthetic oligonucleotide
aagcatatcctggcctac

SEQ ID NO: 1473 - DNA, 18 bp, Artificial Sequence
  Description of Artificial Sequence: Synthetic oligonucleotide
atctcaagcatatcctgg

SEQ ID NO: 1474 - DNA, 18 bp, Artificial Sequence
  Description of Artificial Sequence: Synthetic oligonucleotide
ttagaatctcaagcatat

SEQ ID NO: 1475 - DNA, 18 bp, Artificial Sequence
  Description of Artificial Sequence: Synthetic oligonucleotide
tgtcattagaatctcaag

SEQ ID NO: 1476 - DNA, 18 bp, Artificial Sequence
  Description of Artificial Sequence: Synthetic oligonucleotide
aaaactgtcattagaatc

SEQ ID NO: 1477 - DNA, 18 bp, Artificial Sequence
  Description of Artificial Sequence: Synthetic oligonucleotide
ctgagaaaactgtcatta

SEQ ID NO: 1478 - DNA, 18 bp, Artificial Sequence
  Description of Artificial Sequence: Synthetic oligonucleotide
aagctgagaaaactgtca

SEQ ID NO: 1479 - DNA, 18 bp, Artificial Sequence
  Description of Artificial Sequence: Synthetic oligonucleotide
ctgtgaagctgagaaaac

SEQ ID NO: 1480 - DNA, 18 bp, Artificial Sequence
  Description of Artificial Sequence: Synthetic oligonucleotide
atgcgctgtgaagctgag

SEQ ID NO: 1481 - DNA, 18 bp, Artificial Sequence
  Description of Artificial Sequence: Synthetic oligonucleotide
gttcgatgcgctgtgaag

SEQ ID NO: 1482 - DNA, 18 bp, Artificial Sequence
  Description of Artificial Sequence: Synthetic oligonucleotide
atggagttcgatgcgctg

SEQ ID NO: 1483 - DNA, 18 bp, Artificial Sequence
  Description of Artificial Sequence: Synthetic oligonucleotide
tttaaatggagttcgatg

SEQ ID NO: 1484 - DNA, 18 bp, Artificial Sequence
  Description of Artificial Sequence: Synthetic oligonucleotide
tgtggtttaaatggagtt

SEQ ID NO: 1485 - DNA, 18 bp, Artificial Sequence
  Description of Artificial Sequence: Synthetic oligonucleotide
tctgctgtggtttaaatg

SEQ ID NO: 1486 - DNA, 18 bp, Artificial Sequence
  Description of Artificial Sequence: Synthetic oligonucleotide
aagcctctgctgtggttt

SEQ ID NO: 1487 - DNA, 18 bp, Artificial Sequence
  Description of Artificial Sequence: Synthetic oligonucleotide
ctataaagcctctgctgt

SEQ ID NO: 1488 - DNA, 18 bp, Artificial Sequence
  Description of Artificial Sequence: Synthetic oligonucleotide
gctttctataaagcctct

SEQ ID NO: 1489 - DNA, 18 bp, Artificial Sequence
  Description of Artificial Sequence: Synthetic oligonucleotide
cggatgctttctataaag

SEQ ID NO: 1490 - DNA, 18 bp, Artificial Sequence
  Description of Artificial Sequence: Synthetic oligonucleotide
ctgggcggatgctttcta

SEQ ID NO: 1491 - DNA, 18 bp, Artificial Sequence
  Description of Artificial Sequence: Synthetic oligonucleotide
aagagctgggcggatgct

SEQ ID NO: 1492 - DNA, 18 bp, Artificial Sequence
  Description of Artificial Sequence: Synthetic oligonucleotide
agctcaagagctgggcgg

SEQ ID NO: 1493 - DNA, 18 bp, Artificial Sequence
  Description of Artificial Sequence: Synthetic oligonucleotide
tagacagctcaagagctg

SEQ ID NO: 1494 - DNA, 18 bp, Artificial Sequence
  Description of Artificial Sequence: Synthetic oligonucleotide
ggccttagacagctcaag

SEQ ID NO: 1495 - DNA, 18 bp, Artificial Sequence
  Description of Artificial Sequence: Synthetic oligonucleotide
acagaggccttagacagc

SEQ ID NO: 1496 - DNA, 18 bp, Artificial Sequence
  Description of Artificial Sequence: Synthetic oligonucleotide
tggtgacagaggccttag

SEQ ID NO: 1497 - DNA, 18 bp, Artificial Sequence
  Description of Artificial Sequence: Synthetic oligonucleotide
gcacttggtgacagaggc

SEQ ID NO: 1498 - DNA, 18 bp, Artificial Sequence
  Description of Artificial Sequence: Synthetic oligonucleotide
atggagcacttggtgaca

SEQ ID NO: 1499 - DNA, 18 bp, Artificial Sequence
  Description of Artificial Sequence: Synthetic oligonucleotide
tgcttatggagcacttgg

SEQ ID NO: 1500 - DNA, 18 bp, Artificial Sequence
  Description of Artificial Sequence: Synthetic oligonucleotide
caacttgcttatggagca

SEQ ID NO: 1501 - DNA, 18 bp, Artificial Sequence
  Description of Artificial Sequence: Synthetic oligonucleotide
agttccaacttgcttatg

SEQ ID NO: 1502 - DNA, 18 bp, Artificial Sequence
  Description of Artificial Sequence: Synthetic oligonucleotide
cttgcaccaaggtggctc

SEQ ID NO: 1503 - DNA, 18 bp, Artificial Sequence
  Description of Artificial Sequence: Synthetic oligonucleotide
gccgtcttgcaccaaggt

SEQ ID NO: 1504 - DNA, 18 bp, Artificial Sequence
  Description of Artificial Sequence: Synthetic oligonucleotide
gccaggccgtcttgcacc

SEQ ID NO: 1505 - DNA, 18 bp, Artificial Sequence
  Description of Artificial Sequence: Synthetic oligonucleotide
tcagggccaggccgtctt

SEQ ID NO: 1506 - DNA, 18 bp, Artificial Sequence
  Description of Artificial Sequence: Synthetic oligonucleotide
atccgtcagggccaggcc

SEQ ID NO: 1507 - DNA, 18 bp, Artificial Sequence
  Description of Artificial Sequence: Synthetic oligonucleotide
accacatccgtcagggcc

SEQ ID NO: 1508 - DNA, 18 bp, Artificial Sequence
  Description of Artificial Sequence: Synthetic oligonucleotide
gaggcaccacatccgtca

SEQ ID NO: 1509 - DNA, 18 bp, Artificial Sequence
  Description of Artificial Sequence: Synthetic oligonucleotide
gccccgaggcaccacatc

SEQ ID NO: 1510 - DNA, 18 bp, Artificial Sequence
  Description of Artificial Sequence: Synthetic oligonucleotide
ttggtgccccgaggcacc

SEQ ID NO: 1511 - DNA, 18 bp, Artificial Sequence
  Description of Artificial Sequence: Synthetic oligonucleotide
gctccttggtgccccgag

SEQ ID NO: 1512 - DNA, 18 bp, Artificial Sequence
  Description of Artificial Sequence: Synthetic oligonucleotide
ggcatgctccttggtgcc

SEQ ID NO: 1513 - DNA, 18 bp, Artificial Sequence
  Description of Artificial Sequence: Synthetic oligonucleotide
aggaaggcatgctccttg

SEQ ID NO: 1514 - DNA, 18 bp, Artificial Sequence
  Description of Artificial Sequence: Synthetic oligonucleotide
cgctcaggaaggcatgct

SEQ ID NO: 1515 - DNA, 18 bp, Artificial Sequence
  Description of Artificial Sequence: Synthetic oligonucleotide
ctgggcgctcaggaaggc

SEQ ID NO: 1516 - DNA, 18 bp, Artificial Sequence
  Description of Artificial Sequence: Synthetic oligonucleotide
ctgagctgggcgctcagg

SEQ ID NO: 1517 - DNA, 18 bp, Artificial Sequence
  Description of Artificial Sequence: Synthetic oligonucleotide
agtacctgagctgggcgc

SEQ ID NO: 1518 - DNA, 18 bp, Artificial Sequence
  Description of Artificial Sequence: Synthetic oligonucleotide
ggagaagtacctgagctg

SEQ ID NO: 1519 - DNA, 18 bp, Artificial Sequence
  Description of Artificial Sequence: Synthetic oligonucleotide
tacagggagaagtacctg

SEQ ID NO: 1520 - DNA, 18 bp, Artificial Sequence
  Description of Artificial Sequence: Synthetic oligonucleotide
tcgtacagggagaagtac

SEQ ID NO: 1521 - DNA, 18 bp, Artificial Sequence
  Description of Artificial Sequence: Synthetic oligonucleotide
ccacctcgtacagggaga

SEQ ID NO: 1522 - DNA, 18 bp, Artificial Sequence
  Description of Artificial Sequence: Synthetic oligonucleotide
cagggccacctcgtacag

SEQ ID NO: 1523 - DNA, 18 bp, Artificial Sequence
  Description of Artificial Sequence: Synthetic oligonucleotide
gtcaccagggccacctcg

SEQ ID NO: 1524 - DNA, 18 bp, Artificial Sequence
  Description of Artificial Sequence: Synthetic oligonucleotide
cctgggtcaccagggcca

SEQ ID NO: 1525 - DNA, 18 bp, Artificial Sequence
  Description of Artificial Sequence: Synthetic oligonucleotide
gccaccctgggtcaccag

SEQ ID NO: 1526 - DNA, 18 bp, Artificial Sequence
  Description of Artificial Sequence: Synthetic oligonucleotide
tcaaagccaccctgggtc

SEQ ID NO: 1527 - DNA, 18 bp, Artificial Sequence
  Description of Artificial Sequence: Synthetic oligonucleotide
cgtagtcaaagccaccct

SEQ ID NO: 1528 - DNA, 18 bp, Artificial Sequence
  Description of Artificial Sequence: Synthetic oligonucleotide
gtgggcgtagtcaaagcc

SEQ ID NO: 1529 - DNA, 18 bp, Artificial Sequence
  Description of Artificial Sequence: Synthetic oligonucleotide
tgggagtgggcgtagtca

SEQ ID NO: 1530 - DNA, 18 bp, Artificial Sequence
  Description of Artificial Sequence: Synthetic oligonucleotide
cgcgttgggagtgggcgt

SEQ ID NO: 1531 - DNA, 18 bp, Artificial Sequence
  Description of Artificial Sequence: Synthetic oligonucleotide
gagggcgcgttgggagtg

SEQ ID NO: 1532 - DNA, 18 bp, Artificial Sequence
  Description of Artificial Sequence: Synthetic oligonucleotide
tcaaagagggcgcgttgg

SEQ ID NO: 1533 - DNA, 18 bp, Artificial Sequence
  Description of Artificial Sequence: Synthetic oligonucleotide
gcagatcaaagagggcgc

SEQ ID NO: 1534 - DNA, 18 bp, Artificial Sequence
  Description of Artificial Sequence: Synthetic oligonucleotide
ctggtgcagatcaaagag

SEQ ID NO: 1535 - DNA, 18 bp, Artificial Sequence
  Description of Artificial Sequence: Synthetic oligonucleotide
gcgctggtgcagatcaaa

SEQ ID NO: 1536 - DNA, 18 bp, Artificial Sequence
  Description of Artificial Sequence: Synthetic oligonucleotide
ctgaagcgctggtgcaga

SEQ ID NO: 1537 - DNA, 18 bp, Artificial Sequence
  Description of Artificial Sequence: Synthetic oligonucleotide
gggaactgaagcgctggt

SEQ ID NO: 1538 - DNA, 18 bp, Artificial Sequence
  Description of Artificial Sequence: Synthetic oligonucleotide
cttgagggaactgaagcg

SEQ ID NO: 1539 - DNA, 18 bp, Artificial Sequence
  Description of Artificial Sequence: Synthetic oligonucleotide
accgccttgagggaactg

SEQ ID NO: 1540 - DNA, 18 bp, Artificial Sequence
  Description of Artificial Sequence: Synthetic oligonucleotide
gcagcaccgccttgaggg

SEQ ID NO: 1541 - DNA, 18 bp, Artificial Sequence
  Description of Artificial Sequence: Synthetic oligonucleotide
tgggggcagcaccgcctt

SEQ ID NO: 1542 - DNA, 18 bp, Artificial Sequence
  Description of Artificial Sequence: Synthetic oligonucleotide
gccggtgggggcagcacc

SEQ ID NO: 1543 - DNA, 18 bp, Artificial Sequence
  Description of Artificial Sequence: Synthetic oligonucleotide
gggtggccggtgggggca

SEQ ID NO: 1544 - DNA, 18 bp, Artificial Sequence
  Description of Artificial Sequence: Synthetic oligonucleotide
tgcctgggtggccggtgg

SEQ ID NO: 1545 - DNA, 18 bp, Artificial Sequence
  Description of Artificial Sequence: Synthetic oligonucleotide
cggggtgcctgggtggcc

SEQ ID NO: 1546 - DNA, 18 bp, Artificial Sequence
  Description of Artificial Sequence: Synthetic oligonucleotide
aggtgcggggtgcctggg

SEQ ID NO: 1547 - DNA, 18 bp, Artificial Sequence
  Description of Artificial Sequence: Synthetic oligonucleotide
cagccaggtgcggggtgc

SEQ ID NO: 1548 - DNA, 18 bp, Artificial Sequence
  Description of Artificial Sequence: Synthetic oligonucleotide
gggactggagcctgaaga

SEQ ID NO: 1549 - DNA, 18 bp, Artificial Sequence
  Description of Artificial Sequence: Synthetic oligonucleotide
gttgcgggactggagcct

SEQ ID NO: 1550 - DNA, 18 bp, Artificial Sequence
  Description of Artificial Sequence: Synthetic oligonucleotide
cagaagttgcgggactgg

SEQ ID NO: 1551 - DNA, 18 bp, Artificial Sequence
  Description of Artificial Sequence: Synthetic oligonucleotide
gatagcagaagttgcggg

SEQ ID NO: 1552 - DNA, 18 bp, Artificial Sequence
  Description of Artificial Sequence: Synthetic oligonucleotide
aatgggatagcagaagtt

SEQ ID NO: 1553 - DNA, 18 bp, Artificial Sequence
  Description of Artificial Sequence: Synthetic oligonucleotide
agatgaatgggatagcag

SEQ ID NO: 1554 - DNA, 18 bp, Artificial Sequence
  Description of Artificial Sequence: Synthetic oligonucleotide
ctcagagatgaatgggat

SEQ ID NO: 1555 - DNA, 18 bp, Artificial Sequence
  Description of Artificial Sequence: Synthetic oligonucleotide
atgttctcagagatgaat

SEQ ID NO: 1556 - DNA, 18 bp, Artificial Sequence
  Description of Artificial Sequence: Synthetic oligonucleotide
gggatatgttctcagaga

SEQ ID NO: 1557 - DNA, 18 bp, Artificial Sequence
  Description of Artificial Sequence: Synthetic oligonucleotide
cccttgggatatgttctc

SEQ ID NO: 1558 - DNA, 18 bp, Artificial Sequence
  Description of Artificial Sequence: Synthetic oligonucleotide
atatacccttgggatatg

SEQ ID NO: 1559 - DNA, 18 bp, Artificial Sequence
  Description of Artificial Sequence: Synthetic oligonucleotide
aaaatatatacccttggg

SEQ ID NO: 1560 - DNA, 18 bp, Artificial Sequence
  Description of Artificial Sequence: Synthetic oligonucleotide
ggaggaaaatatataccc

SEQ ID NO: 1561 - DNA, 18 bp, Artificial Sequence
  Description of Artificial Sequence: Synthetic oligonucleotide
ttttcggaggaaaatata

SEQ ID NO: 1562 - DNA, 18 bp, Artificial Sequence
  Description of Artificial Sequence: Synthetic oligonucleotide
ctgggttttcggaggaaa

SEQ ID NO: 1563 - DNA, 18 bp, Artificial Sequence
  Description of Artificial Sequence: Synthetic oligonucleotide
tgtctctgggttttcgga

SEQ ID NO: 1564 - DNA, 18 bp, Artificial Sequence
  Description of Artificial Sequence: Synthetic oligonucleotide
gttattgtctctgggttt

SEQ ID NO: 1565 - DNA, 18 bp, Artificial Sequence
  Description of Artificial Sequence: Synthetic oligonucleotide
catatgttattgtctctg

SEQ ID NO: 1566 - DNA, 18 bp, Artificial Sequence
  Description of Artificial Sequence: Synthetic oligonucleotide
gacatcatatgttattgt

SEQ ID NO: 1567 - DNA, 18 bp, Artificial Sequence
  Description of Artificial Sequence: Synthetic oligonucleotide
ataaggacatcatatgtt

SEQ ID NO: 1568 - DNA, 18 bp, Artificial Sequence
  Description of Artificial Sequence: Synthetic oligonucleotide
ctggtataaggacatcat

SEQ ID NO: 1569 - DNA, 18 bp, Artificial Sequence
  Description of Artificial Sequence: Synthetic oligonucleotide
agattctggtataaggac

SEQ ID NO: 1570 - DNA, 18 bp, Artificial Sequence
  Description of Artificial Sequence: Synthetic oligonucleotide
ctagcagattctggtata

SEQ ID NO: 1571 - DNA, 18 bp, Artificial Sequence
  Description of Artificial Sequence: Synthetic oligonucleotide
catttctagcagattctg

SEQ ID NO: 1572 - DNA, 18 bp, Artificial Sequence
  Description of Artificial Sequence: Synthetic oligonucleotide
ggaagcatttctagcaga

SEQ ID NO: 1573 - DNA, 18 bp, Artificial Sequence
  Description of Artificial Sequence: Synthetic oligonucleotide
tcttcggaagcatttcta

SEQ ID NO: 1574 - DNA, 18 bp, Artificial Sequence
  Description of Artificial Sequence: Synthetic oligonucleotide
ttgaatcttcggaagcat

SEQ ID NO: 1575 - DNA, 18 bp, Artificial Sequence
  Description of Artificial Sequence: Synthetic oligonucleotide
tgaagttgaatcttcgga

SEQ ID NO: 1576 - DNA, 18 bp, Artificial Sequence
  Description of Artificial Sequence: Synthetic oligonucleotide
cctgatgaagttgaatct

SEQ ID NO: 1577 - DNA, 18 bp, Artificial Sequence
  Description of Artificial Sequence: Synthetic oligonucleotide
ctgaacctgatgaagttg

SEQ ID NO: 1578 - DNA, 18 bp, Artificial Sequence
  Description of Artificial Sequence: Synthetic oligonucleotide
ttcttctgaacctgatga

SEQ ID NO: 1579 - DNA, 18 bp, Artificial Sequence
  Description of Artificial Sequence: Synthetic oligonucleotide
agtgattcttctgaacct

SEQ ID NO: 1580 - DNA, 18 bp, Artificial Sequence
  Description of Artificial Sequence: Synthetic oligonucleotide
cctttagtgattcttctg

SEQ ID NO: 1581 - DNA, 18 bp, Artificial Sequence
  Description of Artificial Sequence: Synthetic oligonucleotide
aggatcctttagtgattc

SEQ ID NO: 1582 - DNA, 18 bp, Artificial Sequence
  Description of Artificial Sequence: Synthetic oligonucleotide
atagaaggatcctttagt

SEQ ID NO: 1583 - DNA, 18 bp, Artificial Sequence
  Description of Artificial Sequence: Synthetic oligonucleotide
cctccatagaaggatcct

SEQ ID NO: 1584 - DNA, 18 bp, Artificial Sequence
  Description of Artificial Sequence: Synthetic oligonucleotide
atttccctccatagaagg

SEQ ID NO: 1585 - DNA, 18 bp, Artificial Sequence
  Description of Artificial Sequence: Synthetic oligonucleotide
cacacatttccctccata

SEQ ID NO: 1586 - DNA, 18 bp, Artificial Sequence
  Description of Artificial Sequence: Synthetic oligonucleotide
gaaaccacacatttccct

SEQ ID NO: 1587 - DNA, 18 bp, Artificial Sequence
  Description of Artificial Sequence: Synthetic oligonucleotide
gctaggaaaccacacatt

SEQ ID NO: 1588 - DNA, 18 bp, Artificial Sequence
  Description of Artificial Sequence: Synthetic oligonucleotide
gtagagctaggaaaccac

SEQ ID NO: 1589 - DNA, 18 bp, Artificial Sequence
  Description of Artificial Sequence: Synthetic oligonucleotide
tgtctgtagagctaggaa

SEQ ID NO: 1590 - DNA, 18 bp, Artificial Sequence
  Description of Artificial Sequence: Synthetic oligonucleotide
tgttatgtctgtagagct

SEQ ID NO: 1591 - DNA, 18 bp, Artificial Sequence
  Description of Artificial Sequence: Synthetic oligonucleotide
tgtgctgttatgtctgta

SEQ ID NO: 1592 - DNA, 18 bp, Artificial Sequence
  Description of Artificial Sequence: Synthetic oligonucleotide
cgggctgtgctgttatgt

SEQ ID NO: 1593 - DNA, 18 bp, Artificial Sequence
  Description of Artificial Sequence: Synthetic oligonucleotide
aacatcgggctgtgctgt

SEQ ID NO: 1594 - DNA, 18 bp, Artificial Sequence
  Description of Artificial Sequence: Synthetic oligonucleotide
gatccaacatcgggctgt

SEQ ID NO: 1595 - DNA, 18 bp, Artificial Sequence
  Description of Artificial Sequence: Synthetic oligonucleotide
tgcctgatccaacatcgg

SEQ ID NO: 1596 - DNA, 18 bp, Artificial Sequence
  Description of Artificial Sequence: Synthetic oligonucleotide
ctctctgcctgatccaac

SEQ ID NO: 1597 - DNA, 18 bp, Artificial Sequence
  Description of Artificial Sequence: Synthetic oligonucleotide
aagctctctctgcctgat

SEQ ID NO: 1598 - DNA, 18 bp, Artificial Sequence
  Description of Artificial Sequence: Synthetic oligonucleotide
ggagaaagctctctctgc

SEQ ID NO: 1599 - DNA, 18 bp, Artificial Sequence
  Description of Artificial Sequence: Synthetic oligonucleotide
agtctggagaaagctctc

SEQ ID NO: 1600 - DNA, 18 bp, Artificial Sequence
  Description of Artificial Sequence: Synthetic oligonucleotide
taattagtctggagaaag

SEQ ID NO: 1601 - DNA, 18 bp, Artificial Sequence
  Description of Artificial Sequence: Synthetic oligonucleotide
cagtgtaattagtctgga

SEQ ID NO: 1602 - DNA, 18 bp, Artificial Sequence
  Description of Artificial Sequence: Synthetic oligonucleotide
tatctcagtgtaattagt

SEQ ID NO: 1603 - DNA, 18 bp, Artificial Sequence
  Description of Artificial Sequence: Synthetic oligonucleotide
acacgtatctcagtgtaa

SEQ ID NO: 1604 - DNA, 18 bp, Artificial Sequence
  Description of Artificial Sequence: Synthetic oligonucleotide
catcaacacgtatctcag

SEQ ID NO: 1605 - DNA, 18 bp, Artificial Sequence
  Description of Artificial Sequence: Synthetic oligonucleotide
agattcatcaacacgtat

SEQ ID NO: 1606 - DNA, 18 bp, Artificial Sequence
  Description of Artificial Sequence: Synthetic oligonucleotide
ttctcagattcatcaaca

SEQ ID NO: 1607 - DNA, 18 bp, Artificial Sequence
  Description of Artificial Sequence: Synthetic oligonucleotide
ttgtcttctcagattcat

SEQ ID NO: 1608 - DNA, 18 bp, Artificial Sequence
  Description of Artificial Sequence: Synthetic oligonucleotide
cttggttgtcttctcaga

SEQ ID NO: 1609 - DNA, 18 bp, Artificial Sequence
  Description of Artificial Sequence: Synthetic oligonucleotide
aaggacttggttgtcttc

SEQ ID NO: 1610 - DNA, 18 bp, Artificial Sequence
  Description of Artificial Sequence: Synthetic oligonucleotide
cagaaaaggacttggttg

SEQ ID NO: 1611 - DNA, 18 bp, Artificial Sequence
  Description of Artificial Sequence: Synthetic oligonucleotide
gcctgcagaaaaggactt

SEQ ID NO: 1612 - DNA, 18 bp, Artificial Sequence
  Description of Artificial Sequence: Synthetic oligonucleotide
actgggcctgcagaaaag

SEQ ID NO: 1613 - DNA, 18 bp, Artificial Sequence
  Description of Artificial Sequence: Synthetic oligonucleotide
acatcactgggcctgcag

SEQ ID NO: 1614 - DNA, 18 bp, Artificial Sequence
  Description of Artificial Sequence: Synthetic oligonucleotide
ctgtgacatcactgggcc

SEQ ID NO: 1615 - DNA, 18 bp, Artificial Sequence
  Description of Artificial Sequence: Synthetic oligonucleotide
ggaccctgtgacatcact

SEQ ID NO: 1616 - DNA, 18 bp, Artificial Sequence
  Description of Artificial Sequence: Synthetic oligonucleotide
ctgagggaccctgtgaca

SEQ ID NO: 1617 - DNA, 18 bp, Artificial Sequence
  Description of Artificial Sequence: Synthetic oligonucleotide
tgtaactgagggaccctg

SEQ ID NO: 1618 - DNA, 18 bp, Artificial Sequence
  Description of Artificial Sequence: Synthetic oligonucleotide
agatctgtaactgaggga

SEQ ID NO: 1619 - DNA, 18 bp, Artificial Sequence
  Description of Artificial Sequence: Synthetic oligonucleotide
tttccagatctgtaactg

SEQ ID NO: 1620 - DNA, 18 bp, Artificial Sequence
  Description of Artificial Sequence: Synthetic oligonucleotide
tggcatttccagatctgt

SEQ ID NO: 1621 - DNA, 18 bp, Artificial Sequence
  Description of Artificial Sequence: Synthetic oligonucleotide
taatgtggcatttccaga

SEQ ID NO: 1622 - DNA, 18 bp, Artificial Sequence
  Description of Artificial Sequence: Synthetic oligonucleotide
tagaataatgtggcattt

SEQ ID NO: 1623 - DNA, 18 bp, Artificial Sequence
  Description of Artificial Sequence: Synthetic oligonucleotide
aaaggtagaataatgtgg

SEQ ID NO: 1624 - DNA, 18 bp, Artificial Sequence
  Description of Artificial Sequence: Synthetic oligonucleotide
taggcaaaggtagaataa

SEQ ID NO: 1625 - DNA, 18 bp, Artificial Sequence
  Description of Artificial Sequence: Synthetic oligonucleotide
ggaagtaggcaaaggtag

SEQ ID NO: 1626 - DNA, 18 bp, Artificial Sequence
  Description of Artificial Sequence: Synthetic oligonucleotide
agttgggaagtaggcaaa

SEQ ID NO: 1627 - DNA, 18 bp, Artificial Sequence
  Description of Artificial Sequence: Synthetic oligonucleotide
acctcagttgggaagtag

SEQ ID NO: 1628 - DNA, 18 bp, Artificial Sequence
  Description of Artificial Sequence: Synthetic oligonucleotide
gtgttacctcagttggga

SEQ ID NO: 1629 - DNA, 18 bp, Artificial Sequence
  Description of Artificial Sequence: Synthetic oligonucleotide
atgaggtgttacctcagt

SEQ ID NO: 1630 - DNA, 18 bp, Artificial Sequence
  Description of Artificial Sequence: Synthetic oligonucleotide
aaagcatgaggtgttacc

SEQ ID NO: 1631 - DNA, 18 bp, Artificial Sequence
  Description of Artificial Sequence: Synthetic oligonucleotide
gggtaaaagcatgaggtg

SEQ ID NO: 1632 - DNA, 18 bp, Artificial Sequence
  Description of Artificial Sequence: Synthetic oligonucleotide
ggatggggtaaaagcatg

SEQ ID NO: 1633 - DNA, 18 bp, Artificial Sequence
  Description of Artificial Sequence: Synthetic oligonucleotide
ctggaggatggggtaaaa

SEQ ID NO: 1634 - DNA, 18 bp, Artificial Sequence
  Description of Artificial Sequence: Synthetic oligonucleotide
gttgtctggaggatgggg

SEQ ID NO: 1635 - DNA, 18 bp, Artificial Sequence
  Description of Artificial Sequence: Synthetic oligonucleotide
atcctgttgtctggagga

SEQ ID NO: 1636 - DNA, 18 bp, Artificial Sequence
  Description of Artificial Sequence: Synthetic oligonucleotide
accaaatcctgttgtctg

SEQ ID NO: 1637 - DNA, 18 bp, Artificial Sequence
  Description of Artificial Sequence: Synthetic oligonucleotide
tggagaccaaatcctgtt

SEQ ID NO: 1638 - DNA, 18 bp, Artificial Sequence
  Description of Artificial Sequence: Synthetic oligonucleotide
gaccgtggagaccaaatc

SEQ ID NO: 1639 - DNA, 18 bp, Artificial Sequence
  Description of Artificial Sequence: Synthetic oligonucleotide
acgttgaccgtggagacc

SEQ ID NO: 1640 - DNA, 18 bp, Artificial Sequence
  Description of Artificial Sequence: Synthetic oligonucleotide
ataccacgttgaccgtgg

SEQ ID NO: 1641 - DNA, 18 bp, Artificial Sequence
  Description of Artificial Sequence: Synthetic oligonucleotide
cgagtataccacgttgac

SEQ ID NO: 1642 - DNA, 18 bp, Artificial Sequence
  Description of Artificial Sequence: Synthetic oligonucleotide
gtctgcgagtataccacg

SEQ ID NO: 1643 - DNA, 18 bp, Artificial Sequence
  Description of Artificial Sequence: Synthetic oligonucleotide
gggttgtctgcgagtata

SEQ ID NO: 1644 - DNA, 18 bp, Artificial Sequence
  Description of Artificial Sequence: Synthetic oligonucleotide
cggttgggttgtctgcga

SEQ ID NO: 1645 - DNA, 18 bp, Artificial Sequence
  Description of Artificial Sequence: Synthetic oligonucleotide
tataccggttgggttgtc

SEQ ID NO: 1646 - DNA, 18 bp, Artificial Sequence
  Description of Artificial Sequence: Synthetic oligonucleotide
cattgtataccggttggg

SEQ ID NO: 1647 - DNA, 18 bp, Artificial Sequence
  Description of Artificial Sequence: Synthetic oligonucleotide
ctcaccattgtataccgg

SEQ ID NO: 1648 - DNA, 18 bp, Artificial Sequence
  Description of Artificial Sequence: Synthetic oligonucleotide
ggtgtctcaccattgtat

SEQ ID NO: 1649 - DNA, 18 bp, Artificial Sequence
  Description of Artificial Sequence: Synthetic oligonucleotide
gaagaggtgtctcaccat

SEQ ID NO: 1650 - DNA, 18 bp, Artificial Sequence
  Description of Artificial Sequence: Synthetic oligonucleotide
gttgaagaggtgtctcac

SEQ ID NO: 1651 - DNA, 18 bp, Artificial Sequence
  Description of Artificial Sequence: Synthetic oligonucleotide
ggaaggttgaagaggtgt

SEQ ID NO: 1652 - DNA, 18 bp, Artificial Sequence
  Description of Artificial Sequence: Synthetic oligonucleotide
ctgtaggaaggttgaaga

SEQ ID NO: 1653 - DNA, 18 bp, Artificial Sequence
  Description of Artificial Sequence: Synthetic oligonucleotide
cactactgtaggaaggtt

SEQ ID NO: 1654 - DNA, 18 bp, Artificial Sequence
  Description of Artificial Sequence: Synthetic oligonucleotide
gacttcactactgtagga

SEQ ID NO: 1655 - DNA, 18 bp, Artificial Sequence
  Description of Artificial Sequence: Synthetic oligonucleotide
ggaaagacttcactactg

SEQ ID NO: 1656 - DNA, 18 bp, Artificial Sequence
  Description of Artificial Sequence: Synthetic oligonucleotide
ctagaggaaagacttcac

SEQ ID NO: 1657 - DNA, 18 bp, Artificial Sequence
  Description of Artificial Sequence: Synthetic oligonucleotide
ggtgactagaggaaagac

SEQ ID NO: 1658 - DNA, 18 bp, Artificial Sequence
  Description of Artificial Sequence: Synthetic oligonucleotide
aaaggggtgactagagga

SEQ ID NO: 1659 - DNA, 18 bp, Artificial Sequence
  Description of Artificial Sequence: Synthetic oligonucleotide
gcaacaaaggggtgacta

SEQ ID NO: 1660 - DNA, 18 bp, Artificial Sequence
  Description of Artificial Sequence: Synthetic oligonucleotide
gtcaagcaacaaaggggt

SEQ ID NO: 1661 - DNA, 18 bp, Artificial Sequence
  Description of Artificial Sequence: Synthetic oligonucleotide
tgattgtcaagcaacaaa

SEQ ID NO: 1662 - DNA, 18 bp, Artificial Sequence
  Description of Artificial Sequence: Synthetic oligonucleotide
ggatctgattgtcaagca

SEQ ID NO: 1663 - DNA, 18 bp, Artificial Sequence
  Description of Artificial Sequence: Synthetic oligonucleotide
gttgaggatctgattgtc

SEQ ID NO: 1664 - DNA, 18 bp, Artificial Sequence
  Description of Artificial Sequence: Synthetic oligonucleotide
gtagtgttgaggatctga

SEQ ID NO: 1665 - DNA, 18 bp, Artificial Sequence
  Description of Artificial Sequence: Synthetic oligonucleotide
caggggtagtgttgagga

SEQ ID NO: 1666 - DNA, 18 bp, Artificial Sequence
  Description of Artificial Sequence: Synthetic oligonucleotide
agcagcaggggtagtgtt

SEQ ID NO: 1667 - DNA, 18 bp, Artificial Sequence
  Description of Artificial Sequence: Synthetic oligonucleotide
cttgaagcagcaggggta

SEQ ID NO: 1668 - DNA, 18 bp, Artificial Sequence
  Description of Artificial Sequence: Synthetic oligonucleotide
cactacttgaagcagcag

SEQ ID NO: 1669 - DNA, 18 bp, Artificial Sequence
  Description of Artificial Sequence: Synthetic oligonucleotide
cgaatcactacttgaagc

SEQ ID NO: 1670 - DNA, 18 bp, Artificial Sequence
  Description of Artificial Sequence: Synthetic oligonucleotide
aaggccgaatcactactt

SEQ ID NO: 1671 - DNA, 18 bp, Artificial Sequence
  Description of Artificial Sequence: Synthetic oligonucleotide
catgcaaggccgaatcac

SEQ ID NO: 1672 - DNA, 18 bp, Artificial Sequence
  Description of Artificial Sequence: Synthetic oligonucleotide
cgtagcatgcaaggccga

SEQ ID NO: 1673 - DNA, 18 bp, Artificial Sequence
  Description of Artificial Sequence: Synthetic oligonucleotide
acaggcgtagcatgcaag

SEQ ID NO: 1674 - DNA, 18 bp, Artificial Sequence
  Description of Artificial Sequence: Synthetic oligonucleotide
gaaatacaggcgtagcat

SEQ ID NO: 1675 - DNA, 18 bp, Artificial Sequence
  Description of Artificial Sequence: Synthetic oligonucleotide
actgggaaatacaggcgt

SEQ ID NO: 1676 - DNA, 18 bp, Artificial Sequence
  Description of Artificial Sequence: Synthetic oligonucleotide
tcgacactgggaaataca

SEQ ID NO: 1677 - DNA, 18 bp, Artificial Sequence
  Description of Artificial Sequence: Synthetic oligonucleotide
acacatcgacactgggaa

SEQ ID NO: 1678 - DNA, 18 bp, Artificial Sequence
  Description of Artificial Sequence: Synthetic oligonucleotide
aaatgacacatcgacact

SEQ ID NO: 1679 - DNA, 18 bp, Artificial Sequence
  Description of Artificial Sequence: Synthetic oligonucleotide
gattcaaatgacacatcg

SEQ ID NO: 1680 - DNA, 18 bp, Artificial Sequence
  Description of Artificial Sequence: Synthetic oligonucleotide
ggatggattcaaatgaca

SEQ ID NO: 1681 - DNA, 18 bp, Artificial Sequence
  Description of Artificial Sequence: Synthetic oligonucleotide
agacaggatggattcaaa

SEQ ID NO: 1682 - DNA, 18 bp, Artificial Sequence
  Description of Artificial Sequence: Synthetic oligonucleotide
taggaagacaggatggat

SEQ ID NO: 1683 - DNA, 18 bp, Artificial Sequence
  Description of Artificial Sequence: Synthetic oligonucleotide
catcataggaagacagga

SEQ ID NO: 1684 - DNA, 18 bp, Artificial Sequence
  Description of Artificial Sequence: Synthetic oligonucleotide
tgcaccatcataggaaga

SEQ ID NO: 1685 - DNA, 18 bp, Artificial Sequence
  Description of Artificial Sequence: Synthetic oligonucleotide
aaaggtgcaccatcatag

SEQ ID NO: 1686 - DNA, 18 bp, Artificial Sequence
  Description of Artificial Sequence: Synthetic oligonucleotide
gaagcaaaggtgcaccat

SEQ ID NO: 1687 - DNA, 18 bp, Artificial Sequence
  Description of Artificial Sequence: Synthetic oligonucleotide
aaatggaagcaaaggtgc

SEQ ID NO: 1688 - DNA, 18 bp, Artificial Sequence
  Description of Artificial Sequence: Synthetic oligonucleotide
gaggaaaatggaagcaaa

SEQ ID NO: 1689 - DNA, 18 bp, Artificial Sequence
  Description of Artificial Sequence: Synthetic oligonucleotide
aagcagaggaaaatggaa

SEQ ID NO: 1690 - DNA, 18 bp, Artificial Sequence
  Description of Artificial Sequence: Synthetic oligonucleotide
gaaggaagcagaggaaaa

SEQ ID NO: 1691 - DNA, 18 bp, Artificial Sequence
  Description of Artificial Sequence: Synthetic oligonucleotide
ctactgaaggaagcagag

SEQ ID NO: 1692 - DNA, 18 bp, Artificial Sequence
  Description of Artificial Sequence: Synthetic oligonucleotide
attcactactgaaggaag

SEQ ID NO: 1693 - DNA, 18 bp, Artificial Sequence
  Description of Artificial Sequence: Synthetic oligonucleotide
aaacaattcactactgaa

SEQ ID NO: 1694 - DNA, 18 bp, Artificial Sequence
  Description of Artificial Sequence: Synthetic oligonucleotide
tggcgaaacaattcacta

SEQ ID NO: 1695 - DNA, 18 bp, Artificial Sequence
  Description of Artificial Sequence: Synthetic oligonucleotide
gcagatggcgaaacaatt

SEQ ID NO: 1696 - DNA, 18 bp, Artificial Sequence
  Description of Artificial Sequence: Synthetic oligonucleotide
tgtatgcagatggcgaaa

SEQ ID NO: 1697 - DNA, 18 bp, Artificial Sequence
  Description of Artificial Sequence: Synthetic oligonucleotide
gaaactgtatgcagatgg

SEQ ID NO: 1698 - DNA, 18 bp, Artificial Sequence
  Description of Artificial Sequence: Synthetic oligonucleotide
tttgagaaactgtatgca

SEQ ID NO: 1699 - DNA, 18 bp, Artificial Sequence
  Description of Artificial Sequence: Synthetic oligonucleotide
aaggatttgagaaactgt

SEQ ID NO: 1700 - DNA, 18 bp, Artificial Sequence
  Description of Artificial Sequence: Synthetic oligonucleotide
tgtggaaggatttgagaa

SEQ ID NO: 1701 - DNA, 18 bp, Artificial Sequence
  Description of Artificial Sequence: Synthetic oligonucleotide
taacttgtggaaggattt

SEQ ID NO: 1702 - DNA, 18 bp, Artificial Sequence
  Description of Artificial Sequence: Synthetic oligonucleotide
tgaagtaacttgtggaag

SEQ ID NO: 1703 - DNA, 18 bp, Artificial Sequence
  Description of Artificial Sequence: Synthetic oligonucleotide
gtagctgaagtaacttgt

SEQ ID NO: 1704 - DNA, 18 bp, Artificial Sequence
  Description of Artificial Sequence: Synthetic oligonucleotide
tctcggtagctgaagtaa

SEQ ID NO: 1705 - DNA, 18 bp, Artificial Sequence
  Description of Artificial Sequence: Synthetic oligonucleotide
atcactctcggtagctga

SEQ ID NO: 1706 - DNA, 18 bp, Artificial Sequence
  Description of Artificial Sequence: Synthetic oligonucleotide
accttatcactctcggta

SEQ ID NO: 1707 - DNA, 18 bp, Artificial Sequence
  Description of Artificial Sequence: Synthetic oligonucleotide
agggcaccttatcactct

SEQ ID NO: 1708 - DNA, 18 bp, Artificial Sequence
  Description of Artificial Sequence: Synthetic oligonucleotide
atgcaagggcaccttatc

SEQ ID NO: 1709 - DNA, 18 bp, Artificial Sequence
  Description of Artificial Sequence: Synthetic oligonucleotide
gaagcatgcaagggcacc

SEQ ID NO: 1710 - DNA, 18 bp, Artificial Sequence
  Description of Artificial Sequence: Synthetic oligonucleotide
gcagagaagcatgcaagg

SEQ ID NO: 1711 - DNA, 18 bp, Artificial Sequence
  Description of Artificial Sequence: Synthetic oligonucleotide
cactggcagagaagcatg

SEQ ID NO: 1712 - DNA, 18 bp, Artificial Sequence
  Description of Artificial Sequence: Synthetic oligonucleotide
ccagccactggcagagaa

SEQ ID NO: 1713 - DNA, 18 bp, Artificial Sequence
  Description of Artificial Sequence: Synthetic oligonucleotide
cacccccagccactggca

SEQ ID NO: 1714 - DNA, 18 bp, Artificial Sequence
  Description of Artificial Sequence: Synthetic oligonucleotide
caaatcacccccagccac

SEQ ID NO: 1715 - DNA, 18 bp, Artificial Sequence
  Description of Artificial Sequence: Synthetic oligonucleotide
aatagcaaatcaccccca

SEQ ID NO: 1716 - DNA, 18 bp, Artificial Sequence
  Description of Artificial Sequence: Synthetic oligonucleotide
gctctaatagcaaatcac

SEQ ID NO: 1717 - DNA, 18 bp, Artificial Sequence
  Description of Artificial Sequence: Synthetic oligonucleotide
gctgggctctaatagcaa

SEQ ID NO: 1718 - DNA, 18 bp, Artificial Sequence
  Description of Artificial Sequence: Synthetic oligonucleotide
gcaaggctgggctctaat

SEQ ID NO: 1719 - DNA, 18 bp, Artificial Sequence
  Description of Artificial Sequence: Synthetic oligonucleotide
actgagcaaggctgggct

SEQ ID NO: 1720 - DNA, 18 bp, Artificial Sequence
  Description of Artificial Sequence: Synthetic oligonucleotide
agaatactgagcaaggct

SEQ ID NO: 1721 - DNA, 18 bp, Artificial Sequence
  Description of Artificial Sequence: Synthetic oligonucleotide
acatcagaatactgagca

SEQ ID NO: 1722 - DNA, 18 bp, Artificial Sequence
  Description of Artificial Sequence: Synthetic oligonucleotide
acagcacatcagaatact

SEQ ID NO: 1723 - DNA, 18 bp, Artificial Sequence
  Description of Artificial Sequence: Synthetic oligonucleotide
agtggacagcacatcaga

SEQ ID NO: 1724 - DNA, 18 bp, Artificial Sequence
  Description of Artificial Sequence: Synthetic oligonucleotide
tgagtagtggacagcaca

SEQ ID NO: 1725 - DNA, 18 bp, Artificial Sequence
  Description of Artificial Sequence: Synthetic oligonucleotide
cagcatgagtagtggaca

SEQ ID NO: 1726 - DNA, 18 bp, Artificial Sequence
  Description of Artificial Sequence: Synthetic oligonucleotide
tgaagcagcatgagtagt

SEQ ID NO: 1727 - DNA, 18 bp, Artificial Sequence
  Description of Artificial Sequence: Synthetic oligonucleotide
gtctctgaagcagcatga

SEQ ID NO: 1728 - DNA, 18 bp, Artificial Sequence
  Description of Artificial Sequence: Synthetic oligonucleotide
ccagcgtctctgaagcag

SEQ ID NO: 1729 - DNA, 18 bp, Artificial Sequence
  Description of Artificial Sequence: Synthetic oligonucleotide
aaattccagcgtctctga

SEQ ID NO: 1730 - DNA, 18 bp, Artificial Sequence
  Description of Artificial Sequence: Synthetic oligonucleotide
ctaccaaattccagcgtc

SEQ ID NO: 1731 - DNA, 18 bp, Artificial Sequence
  Description of Artificial Sequence: Synthetic oligonucleotide
attcactaccaaattcca

SEQ ID NO: 1732 - DNA, 18 bp, Artificial Sequence
  Description of Artificial Sequence: Synthetic oligonucleotide
accagattcactaccaaa

SEQ ID NO: 1733 - DNA, 18 bp, Artificial Sequence
  Description of Artificial Sequence: Synthetic oligonucleotide
agaacaccagattcacta

SEQ ID NO: 1734 - DNA, 18 bp, Artificial Sequence
  Description of Artificial Sequence: Synthetic oligonucleotide
tataaagaacaccagatt

SEQ ID NO: 1735 - DNA, 18 bp, Artificial Sequence
  Description of Artificial Sequence: Synthetic oligonucleotide
cgttttataaagaacacc

SEQ ID NO: 1736 - DNA, 18 bp, Artificial Sequence
  Description of Artificial Sequence: Synthetic oligonucleotide
ataagcgttttataaaga

SEQ ID NO: 1737 - DNA, 18 bp, Artificial Sequence
  Description of Artificial Sequence: Synthetic oligonucleotide
aaaacataagcgttttat

SEQ ID NO: 1738 - DNA, 18 bp, Artificial Sequence
  Description of Artificial Sequence: Synthetic oligonucleotide
ttgagaaaacataagcgt

SEQ ID NO: 1739 - DNA, 18 bp, Artificial Sequence
  Description of Artificial Sequence: Synthetic oligonucleotide
tcaacttgagaaaacata

SEQ ID NO: 1740 - DNA, 18 bp, Artificial Sequence
  Description of Artificial Sequence: Synthetic oligonucleotide
gtggttcaacttgagaaa

SEQ ID NO: 1741 - DNA, 18 bp, Artificial Sequence
  Description of Artificial Sequence: Synthetic oligonucleotide
gctgggtggttcaacttg

SEQ ID NO: 1742 - DNA, 18 bp, Artificial Sequence
  Description of Artificial Sequence: Synthetic oligonucleotide
tcactgctgggtggttca

SEQ ID NO: 1743 - DNA, 18 bp, Artificial Sequence
  Description of Artificial Sequence: Synthetic oligonucleotide
tggcatcactgctgggtg

SEQ ID NO: 1744 - DNA, 18 bp, Artificial Sequence
  Description of Artificial Sequence: Synthetic oligonucleotide
catcatggcatcactgct

SEQ ID NO: 1745 - DNA, 18 bp, Artificial Sequence
  Description of Artificial Sequence: Synthetic oligonucleotide
gcatgcatcatggcatca

SEQ ID NO: 1746 - DNA, 18 bp, Artificial Sequence
  Description of Artificial Sequence: Synthetic oligonucleotide
aacgtgcatgcatcatgg

SEQ ID NO: 1747 - DNA, 18 bp, Artificial Sequence
  Description of Artificial Sequence: Synthetic oligonucleotide
tgaagaacgtgcatgcat

SEQ ID NO: 1748 - DNA, 18 bp, Artificial Sequence
  Description of Artificial Sequence: Synthetic oligonucleotide
ggccctgaagaacgtgca

SEQ ID NO: 1749 - DNA, 18 bp, Artificial Sequence
  Description of Artificial Sequence: Synthetic oligonucleotide
gttcaggccctgaagaac

SEQ ID NO: 1750 - DNA, 18 bp, Artificial Sequence
  Description of Artificial Sequence: Synthetic oligonucleotide
agaaggttcaggccctga

SEQ ID NO: 1751 - DNA, 18 bp, Artificial Sequence
  Description of Artificial Sequence: Synthetic oligonucleotide
gcataagaaggttcaggc

SEQ ID NO: 1752 - DNA, 18 bp, Artificial Sequence
  Description of Artificial Sequence: Synthetic oligonucleotide
acaaggcataagaaggtt

SEQ ID NO: 1753 - DNA, 18 bp, Artificial Sequence
  Description of Artificial Sequence: Synthetic oligonucleotide
atcagacaaggcataaga

SEQ ID NO: 1754 - DNA, 18 bp, Artificial Sequence
  Description of Artificial Sequence: Synthetic oligonucleotide
tcattatcagacaaggca

SEQ ID NO: 1755 - DNA, 18 bp, Artificial Sequence
  Description of Artificial Sequence: Synthetic oligonucleotide
agccctcattatcagaca

SEQ ID NO: 1756 - DNA, 18 bp, Artificial Sequence
  Description of Artificial Sequence: Synthetic oligonucleotide
ttgggagccctcattatc

SEQ ID NO: 1757 - DNA, 18 bp, Artificial Sequence
  Description of Artificial Sequence: Synthetic oligonucleotide
atgtgttgggagccctca

SEQ ID NO: 1758 - DNA, 18 bp, Artificial Sequence
  Description of Artificial Sequence: Synthetic oligonucleotide
tgaagatgtgttgggagc

SEQ ID NO: 1759 - DNA, 18 bp, Artificial Sequence
  Description of Artificial Sequence: Synthetic oligonucleotide
aacagtgaagatgtgttg

SEQ ID NO: 1760 - DNA, 18 bp, Artificial Sequence
  Description of Artificial Sequence: Synthetic oligonucleotide
taagaaacagtgaagatg

SEQ ID NO: 1761 - DNA, 18 bp, Artificial Sequence
  Description of Artificial Sequence: Synthetic oligonucleotide
aactgtaagaaacagtga

SEQ ID NO: 1762 - DNA, 18 bp, Artificial Sequence
  Description of Artificial Sequence: Synthetic oligonucleotide
tgcagaactgtaagaaac

SEQ ID NO: 1763 - DNA, 18 bp, Artificial Sequence
  Description of Artificial Sequence: Synthetic oligonucleotide
ggtattgcagaactgtaa

SEQ ID NO: 1764 - DNA, 18 bp, Artificial Sequence
  Description of Artificial Sequence: Synthetic oligonucleotide
gcacaggtattgcagaac

SEQ ID NO: 1765 - DNA, 18 bp, Artificial Sequence
  Description of Artificial Sequence: Synthetic oligonucleotide
atcatgcacaggtattgc

SEQ ID NO: 1766 - DNA, 18 bp, Artificial Sequence
  Description of Artificial Sequence: Synthetic oligonucleotide
acagaatcatgcacaggt

SEQ ID NO: 1767 - DNA, 18 bp, Artificial Sequence
  Description of Artificial Sequence: Synthetic oligonucleotide
cacccacagaatcatgca

SEQ ID NO: 1768 - DNA, 18 bp, Artificial Sequence
  Description of Artificial Sequence: Synthetic oligonucleotide
agttacacccacagaatc

SEQ ID NO: 1769 - DNA, 18 bp, Artificial Sequence
  Description of Artificial Sequence: Synthetic oligonucleotide
tgataagttacacccaca

SEQ ID NO: 1770 - DNA, 18 bp, Artificial Sequence
  Description of Artificial Sequence: Synthetic oligonucleotide
aaccctgataagttacac

SEQ ID NO: 1771 - DNA, 18 bp, Artificial Sequence
  Description of Artificial Sequence: Synthetic oligonucleotide
taaggaaccctgataagt

SEQ ID NO: 1772 - DNA, 18 bp, Artificial Sequence
  Description of Artificial Sequence: Synthetic oligonucleotide
ctaaataaggaaccctga

SEQ ID NO: 1773 - DNA, 18 bp, Artificial Sequence
  Description of Artificial Sequence: Synthetic oligonucleotide
ggccgctaaataaggaac

SEQ ID NO: 1774 - DNA, 18 bp, Artificial Sequence
  Description of Artificial Sequence: Synthetic oligonucleotide
gctagggccgctaaataa

SEQ ID NO: 1775 - DNA, 18 bp, Artificial Sequence
  Description of Artificial Sequence: Synthetic oligonucleotide
atatggctagggccgcta

SEQ ID NO: 1776 - DNA, 18 bp, Artificial Sequence
  Description of Artificial Sequence: Synthetic oligonucleotide
ttggtatatggctagggc

SEQ ID NO: 1777 - DNA, 18 bp, Artificial Sequence
  Description of Artificial Sequence: Synthetic oligonucleotide
aggtattggtatatggct

SEQ ID NO: 1778 - DNA, 18 bp, Artificial Sequence
  Description of Artificial Sequence: Synthetic oligonucleotide
gacttaggtattggtata

SEQ ID NO: 1779 - DNA, 18 bp, Artificial Sequence
  Description of Artificial Sequence: Synthetic oligonucleotide
acgaagacttaggtattg

SEQ ID NO: 1780 - DNA, 18 bp, Artificial Sequence
  Description of Artificial Sequence: Synthetic oligonucleotide
tattaacgaagacttagg

SEQ ID NO: 1781 - DNA, 18 bp, Artificial Sequence
  Description of Artificial Sequence: Synthetic oligonucleotide
ggggttattaacgaagac

SEQ ID NO: 1782 - DNA, 18 bp, Artificial Sequence
  Description of Artificial Sequence: Synthetic oligonucleotide
cagttggggttattaacg

SEQ ID NO: 1783 - DNA, 18 bp, Artificial Sequence
  Description of Artificial Sequence: Synthetic oligonucleotide
tgatgcagttggggttat

SEQ ID NO: 1784 - DNA, 18 bp, Artificial Sequence
  Description of Artificial Sequence: Synthetic oligonucleotide
agtaatgatgcagttggg

SEQ ID NO: 1785 - DNA, 18 bp, Artificial Sequence
  Description of Artificial Sequence: Synthetic oligonucleotide
gctgcagtaatgatgcag

SEQ ID NO: 1786 - DNA, 18 bp, Artificial Sequence
  Description of Artificial Sequence: Synthetic oligonucleotide
agtaggctgcagtaatga

SEQ ID NO: 1787 - DNA, 18 bp, Artificial Sequence
  Description of Artificial Sequence: Synthetic oligonucleotide
gcatgagtaggctgcagt

SEQ ID NO: 1788 - DNA, 18 bp, Artificial Sequence
  Description of Artificial Sequence: Synthetic oligonucleotide
agagggcatgagtaggct

SEQ ID NO: 1789 - DNA, 18 bp, Artificial Sequence
  Description of Artificial Sequence: Synthetic oligonucleotide
accagagagggcatgagt

SEQ ID NO: 1790 - DNA, 18 bp, Artificial Sequence
  Description of Artificial Sequence: Synthetic oligonucleotide
ccatcaccagagagggca

SEQ ID NO: 1791 - DNA, 18 bp, Artificial Sequence
  Description of Artificial Sequence: Synthetic oligonucleotide
attccccatcaccagaga

SEQ ID NO: 1792 - DNA, 18 bp, Artificial Sequence
  Description of Artificial Sequence: Synthetic oligonucleotide
agaccattccccatcacc

SEQ ID NO: 1793 - DNA, 18 bp, Artificial Sequence
  Description of Artificial Sequence: Synthetic oligonucleotide
gctccagaccattcccca

SEQ ID NO: 1794 - DNA, 18 bp, Artificial Sequence
  Description of Artificial Sequence: Synthetic oligonucleotide
aagaggctccagaccatt

SEQ ID NO: 1795 - DNA, 18 bp, Artificial Sequence
  Description of Artificial Sequence: Synthetic oligonucleotide
atcagaagaggctccaga

SEQ ID NO: 1796 - DNA, 18 bp, Artificial Sequence
  Description of Artificial Sequence: Synthetic oligonucleotide
tcactatcagaagaggct

SEQ ID NO: 1797 - DNA, 18 bp, Artificial Sequence
  Description of Artificial Sequence: Synthetic oligonucleotide
gaaattcactatcagaag

SEQ ID NO: 1798 - DNA, 18 bp, Artificial Sequence
  Description of Artificial Sequence: Synthetic oligonucleotide
taaaagaaattcactatc

SEQ ID NO: 1799 - DNA, 18 bp, Artificial Sequence
  Description of Artificial Sequence: Synthetic oligonucleotide
tcaggtaaaagaaattca

SEQ ID NO: 1800 - DNA, 18 bp, Artificial Sequence
  Description of Artificial Sequence: Synthetic oligonucleotide
ctgtgtcaggtaaaagaa

SEQ ID NO: 1801 - DNA, 18 bp, Artificial Sequence
  Description of Artificial Sequence: Synthetic oligonucleotide
cccatctgtgtcaggtaa

SEQ ID NO: 1802 - DNA, 18 bp, Artificial Sequence
  Description of Artificial Sequence: Synthetic oligonucleotide
gtcagcccatctgtgtca

SEQ ID NO: 1803 - DNA, 18 bp, Artificial Sequence
  Description of Artificial Sequence: Synthetic oligonucleotide
gggctgtcagcccatctg

SEQ ID NO: 1804 - DNA, 18 bp, Artificial Sequence
  Description of Artificial Sequence: Synthetic oligonucleotide
gttaagggctgtcagccc

SEQ ID NO: 1805 - DNA, 18 bp, Artificial Sequence
  Description of Artificial Sequence: Synthetic oligonucleotide
gaaatgttaagggctgtc

SEQ ID NO: 1806 - DNA, 18 bp, Artificial Sequence
  Description of Artificial Sequence: Synthetic oligonucleotide
gtgaagaaatgttaaggg

SEQ ID NO: 1807 - DNA, 18 bp, Artificial Sequence
  Description of Artificial Sequence: Synthetic oligonucleotide
aacaggtgaagaaatgtt

SEQ ID NO: 1808 - DNA, 18 bp, Artificial Sequence
  Description of Artificial Sequence: Synthetic oligonucleotide
acagaaacaggtgaagaa

SEQ ID NO: 1809 - DNA, 18 bp, Artificial Sequence
  Description of Artificial Sequence: Synthetic oligonucleotide
cagctacagaaacaggtg

SEQ ID NO: 1810 - DNA, 18 bp, Artificial Sequence
  Description of Artificial Sequence: Synthetic oligonucleotide
aaattcagctacagaaac

SEQ ID NO: 1811 - DNA, 18 bp, Artificial Sequence
  Description of Artificial Sequence: Synthetic oligonucleotide
tatgtaaattcagctaca

SEQ ID NO: 1812 - DNA, 18 bp, Artificial Sequence
  Description of Artificial Sequence: Synthetic oligonucleotide
ttgtatatgtaaattcag

SEQ ID NO: 1813 - DNA, 18 bp, Artificial Sequence
  Description of Artificial Sequence: Synthetic oligonucleotide
agatgttgtatatgtaaa

SEQ ID NO: 1814 - DNA, 18 bp, Artificial Sequence
  Description of Artificial Sequence: Synthetic oligonucleotide
aacacagatgttgtatat

SEQ ID NO: 1815 - DNA, 18 bp, Artificial Sequence
  Description of Artificial Sequence: Synthetic oligonucleotide
caccaaacacagatgttg

SEQ ID NO: 1816 - DNA, 18 bp, Artificial Sequence
  Description of Artificial Sequence: Synthetic oligonucleotide
atcatcaccaaacacaga

SEQ ID NO: 1817 - DNA, 18 bp, Artificial Sequence
  Description of Artificial Sequence: Synthetic oligonucleotide
ttattatcatcaccaaac

SEQ ID NO: 1818 - DNA, 18 bp, Artificial Sequence
  Description of Artificial Sequence: Synthetic oligonucleotide
gcgccttattatcatcac

SEQ ID NO: 1819 - DNA, 18 bp, Artificial Sequence
  Description of Artificial Sequence: Synthetic oligonucleotide
agaaagcgccttattatc

SEQ ID NO: 1820 - DNA, 18 bp, Artificial Sequence
  Description of Artificial Sequence: Synthetic oligonucleotide
cttttagaaagcgcctta

SEQ ID NO: 1821 - DNA, 18 bp, Artificial Sequence
  Description of Artificial Sequence: Synthetic oligonucleotide
tttcacttttagaaagcg

SEQ ID NO: 1822 - DNA, 18 bp, Artificial Sequence
  Description of Artificial Sequence: Synthetic oligonucleotide
tattatttcacttttaga

SEQ ID NO: 1823 - DNA, 18 bp, Artificial Sequence
  Description of Artificial Sequence: Synthetic oligonucleotide
ccatatattatttcactt

SEQ ID NO: 1824 - DNA, 18 bp, Artificial Sequence
  Description of Artificial Sequence: Synthetic oligonucleotide
catttccatatattattt

SEQ ID NO: 1825 - DNA, 18 bp, Artificial Sequence
  Description of Artificial Sequence: Synthetic oligonucleotide
agtctcatttccatatat

SEQ ID NO: 1826 - DNA, 18 bp, Artificial Sequence
  Description of Artificial Sequence: Synthetic oligonucleotide
agttcagtctcatttcca

SEQ ID NO: 1827 - DNA, 18 bp, Artificial Sequence
  Description of Artificial Sequence: Synthetic oligonucleotide
tttgcagttcagtctcat

SEQ ID NO: 1828 - DNA, 18 bp, Artificial Sequence
  Description of Artificial Sequence: Synthetic oligonucleotide
aggaatttgcagttcagt

SEQ ID NO: 1829 - DNA, 18 bp, Artificial Sequence
  Description of Artificial Sequence: Synthetic oligonucleotide
aaagaaggaatttgcagt

SEQ ID NO: 1830 - DNA, 18 bp, Artificial Sequence
  Description of Artificial Sequence: Synthetic oligonucleotide
cattgaaagaaggaattt

SEQ ID NO: 1831 - DNA, 18 bp, Artificial Sequence
  Description of Artificial Sequence: Synthetic oligonucleotide
catctcattgaaagaagg

SEQ ID NO: 1832 - DNA, 18 bp, Artificial Sequence
  Description of Artificial Sequence: Synthetic oligonucleotide
taaaccatctcattgaaa

SEQ ID NO: 1833 - DNA, 18 bp, Artificial Sequence
  Description of Artificial Sequence: Synthetic oligonucleotide
aagggtaaaccatctcat

SEQ ID NO: 1834 - DNA, 18 bp, Artificial Sequence
  Description of Artificial Sequence: Synthetic oligonucleotide
ttcagaagggtaaaccat

SEQ ID NO: 1835 - DNA, 18 bp, Artificial Sequence
  Description of Artificial Sequence: Synthetic oligonucleotide
gtgctttcagaagggtaa

SEQ ID NO: 1836 - DNA, 18 bp, Artificial Sequence
  Description of Artificial Sequence: Synthetic oligonucleotide
tgactgtgctttcagaag

SEQ ID NO: 1837 - DNA, 18 bp, Artificial Sequence
  Description of Artificial Sequence: Synthetic oligonucleotide
gggcatgactgtgctttc

SEQ ID NO: 1838 - DNA, 18 bp, Artificial Sequence
  Description of Artificial Sequence: Synthetic oligonucleotide
atgttgggcatgactgtg

SEQ ID NO: 1839 - DNA, 18 bp, Artificial Sequence
  Description of Artificial Sequence: Synthetic oligonucleotide
catacatgttgggcatga

SEQ ID NO: 1840 - DNA, 18 bp, Artificial Sequence
  Description of Artificial Sequence: Synthetic oligonucleotide
attatcatacatgttggg

SEQ ID NO: 1841 - DNA, 18 bp, Artificial Sequence
  Description of Artificial Sequence: Synthetic oligonucleotide
tttacattatcatacatg

SEQ ID NO: 1842 - DNA, 18 bp, Artificial Sequence
  Description of Artificial Sequence: Synthetic oligonucleotide
acttatttacattatcat

SEQ ID NO: 1843 - DNA, 18 bp, Artificial Sequence
  Description of Artificial Sequence: Synthetic oligonucleotide
attcaacttatttacatt

SEQ ID NO: 1844 - DNA, 18 bp, Artificial Sequence
  Description of Artificial Sequence: Synthetic oligonucleotide
gacgcattcaacttattt

SEQ ID NO: 1845 - DNA, 18 bp, Artificial Sequence
  Description of Artificial Sequence: Synthetic oligonucleotide
gtaaagacgcattcaact

SEQ ID NO: 1846 - DNA, 18 bp, Artificial Sequence
  Description of Artificial Sequence: Synthetic oligonucleotide
ttcttgtaaagacgcatt

SEQ ID NO: 1847 - DNA, 18 bp, Artificial Sequence
  Description of Artificial Sequence: Synthetic oligonucleotide
gaggtttcttgtaaagac

SEQ ID NO: 1848 - DNA, 18 bp, Artificial Sequence
  Description of Artificial Sequence: Synthetic oligonucleotide
aaacagaggtttcttgta

SEQ ID NO: 1849 - DNA, 18 bp, Artificial Sequence
  Description of Artificial Sequence: Synthetic oligonucleotide
aatggaaacagaggtttc

SEQ ID NO: 1850 - DNA, 18 bp, Artificial Sequence
  Description of Artificial Sequence: Synthetic oligonucleotide
ctagaaatggaaacagag

SEQ ID NO: 1851 - DNA, 18 bp, Artificial Sequence
  Description of Artificial Sequence: Synthetic oligonucleotide
tggtgctagaaatggaaa

SEQ ID NO: 1852 - DNA, 18 bp, Artificial Sequence
  Description of Artificial Sequence: Synthetic oligonucleotide
gcccttggtgctagaaat

SEQ ID NO: 1853 - DNA, 18 bp, Artificial Sequence
  Description of Artificial Sequence: Synthetic oligonucleotide
aacatgcccttggtgcta

SEQ ID NO: 1854 - DNA, 18 bp, Artificial Sequence
  Description of Artificial Sequence: Synthetic oligonucleotide
ctggaaacatgcccttgg

SEQ ID NO: 1855 - DNA, 18 bp, Artificial Sequence
  Description of Artificial Sequence: Synthetic oligonucleotide
ggaccctggaaacatgcc

SEQ ID NO: 1856 - DNA, 18 bp, Artificial Sequence
  Description of Artificial Sequence: Synthetic oligonucleotide
gcaagggaccctggaaac

SEQ ID NO: 1857 - DNA, 18 bp, Artificial Sequence
  Description of Artificial Sequence: Synthetic oligonucleotide
tatgagcaagggaccctg

SEQ ID NO: 1858 - DNA, 18 bp, Artificial Sequence
  Description of Artificial Sequence: Synthetic oligonucleotide
ggtggtatgagcaaggga

SEQ ID NO: 1859 - DNA, 18 bp, Artificial Sequence
  Description of Artificial Sequence: Synthetic oligonucleotide
ttagtggtggtatgagca

SEQ ID NO: 1860 - DNA, 18 bp, Artificial Sequence
  Description of Artificial Sequence: Synthetic oligonucleotide
aaaccttagtggtggtat

SEQ ID NO: 1861 - DNA, 18 bp, Artificial Sequence
  Description of Artificial Sequence: Synthetic oligonucleotide
atcaaaaaccttagtggt

SEQ ID NO: 1862 - DNA, 18 bp, Artificial Sequence
  Description of Artificial Sequence: Synthetic oligonucleotide
tcatgatcaaaaacctta

SEQ ID NO: 1863 - DNA, 18 bp, Artificial Sequence
  Description of Artificial Sequence: Synthetic oligonucleotide
taatctcatgatcaaaaa

SEQ ID NO: 1864 - DNA, 18 bp, Artificial Sequence
  Description of Artificial Sequence: Synthetic oligonucleotide
ttgactaatctcatgatc

SEQ ID NO: 1865 - DNA, 18 bp, Artificial Sequence
  Description of Artificial Sequence: Synthetic oligonucleotide
ggaacttgactaatctca

SEQ ID NO: 1866 - DNA, 18 bp, Artificial Sequence
  Description of Artificial Sequence: Synthetic oligonucleotide
tttctggaacttgactaa

SEQ ID NO: 1867 - DNA, 18 bp, Artificial Sequence
  Description of Artificial Sequence: Synthetic oligonucleotide
gttattttctggaacttg

SEQ ID NO: 1868 - DNA, 18 bp, Artificial Sequence
  Description of Artificial Sequence: Synthetic oligonucleotide
gaaaagttattttctgga

SEQ ID NO: 1869 - DNA, 18 bp, Artificial Sequence
  Description of Artificial Sequence: Synthetic oligonucleotide
gaactgaaaagttatttt

SEQ ID NO: 1870 - DNA, 18 bp, Artificial Sequence
  Description of Artificial Sequence: Synthetic oligonucleotide
aggttgaactgaaaagtt

SEQ ID NO: 1871 - DNA, 18 bp, Artificial Sequence
  Description of Artificial Sequence: Synthetic oligonucleotide
tgtgtaggttgaactgaa

SEQ ID NO: 1872 - DNA, 18 bp, Artificial Sequence
  Description of Artificial Sequence: Synthetic oligonucleotide
cagtatgtgtaggttgaa

SEQ ID NO: 1873 - DNA, 18 bp, Artificial Sequence
  Description of Artificial Sequence: Synthetic oligonucleotide
agagacagtatgtgtagg

SEQ ID NO: 1874 - DNA, 18 bp, Artificial Sequence
  Description of Artificial Sequence: Synthetic oligonucleotide
gcttgagagacagtatgt

SEQ ID NO: 1875 - DNA, 18 bp, Artificial Sequence
  Description of Artificial Sequence: Synthetic oligonucleotide
cagatgcttgagagacag

SEQ ID NO: 1876 - DNA, 18 bp, Artificial Sequence
  Description of Artificial Sequence: Synthetic oligonucleotide
gtcaccagatgcttgaga

SEQ ID NO: 1877 - DNA, 18 bp, Artificial Sequence
  Description of Artificial Sequence: Synthetic oligonucleotide
gaagtgtcaccagatgct

SEQ ID NO: 1878 - DNA, 18 bp, Artificial Sequence
  Description of Artificial Sequence: Synthetic oligonucleotide
taagcgaagtgtcaccag

SEQ ID NO: 1879 - DNA, 18 bp, Artificial Sequence
  Description of Artificial Sequence: Synthetic oligonucleotide
aggtttaagcgaagtgtc

SEQ ID NO: 1880 - DNA, 18 bp, Artificial Sequence
  Description of Artificial Sequence: Synthetic oligonucleotide
agcacaggtttaagcgaa

SEQ ID NO: 1881 - DNA, 18 bp, Artificial Sequence
  Description of Artificial Sequence: Synthetic oligonucleotide
cactaagcacaggtttaa

SEQ ID NO: 1882 - DNA, 18 bp, Artificial Sequence
  Description of Artificial Sequence: Synthetic oligonucleotide
gtttgcactaagcacagg

SEQ ID NO: 1883 - DNA, 18 bp, Artificial Sequence
  Description of Artificial Sequence: Synthetic oligonucleotide
tctgagtttgcactaagc

SEQ ID NO: 1884 - DNA, 18 bp, Artificial Sequence
  Description of Artificial Sequence: Synthetic oligonucleotide
ctggctctgagtttgcac

SEQ ID NO: 1885 - DNA, 18 bp, Artificial Sequence
  Description of Artificial Sequence: Synthetic oligonucleotide
ggatgctggctctgagtt

SEQ ID NO: 1886 - DNA, 18 bp, Artificial Sequence
  Description of Artificial Sequence: Synthetic oligonucleotide
tcagaggatgctggctct

SEQ ID NO: 1887 - DNA, 18 bp, Artificial Sequence
  Description of Artificial Sequence: Synthetic oligonucleotide
cagggtcagaggatgctg

SEQ ID NO: 1888 - DNA, 18 bp, Artificial Sequence
  Description of Artificial Sequence: Synthetic oligonucleotide
agaagcagggtcagagga

SEQ ID NO: 1889 - DNA, 18 bp, Artificial Sequence
  Description of Artificial Sequence: Synthetic oligonucleotide
tcactagaagcagggtca

SEQ ID NO: 1890 - DNA, 18 bp, Artificial Sequence
  Description of Artificial Sequence: Synthetic oligonucleotide
acatttcactagaagcag

SEQ ID NO: 1891 - DNA, 18 bp, Artificial Sequence
  Description of Artificial Sequence: Synthetic oligonucleotide
agataacatttcactaga

SEQ ID NO: 1892 - DNA, 18 bp, Artificial Sequence
  Description of Artificial Sequence: Synthetic oligonucleotide
gaaggagataacatttca

SEQ ID NO: 1893 - DNA, 18 bp, Artificial Sequence
  Description of Artificial Sequence: Synthetic oligonucleotide
gagttgaaggagataaca

SEQ ID NO: 1894 - DNA, 18 bp, Artificial Sequence
  Description of Artificial Sequence: Synthetic oligonucleotide
gagctgagttgaaggaga

SEQ ID NO: 1895 - DNA, 18 bp, Artificial Sequence
  Description of Artificial Sequence: Synthetic oligonucleotide
aataagagctgagttgaa

SEQ ID NO: 1896 - DNA, 18 bp, Artificial Sequence
  Description of Artificial Sequence: Synthetic oligonucleotide
cataaaataagagctgag

SEQ ID NO: 1897 - DNA, 18 bp, Artificial Sequence
  Description of Artificial Sequence: Synthetic oligonucleotide
ggtctcataaaataagag

SEQ ID NO: 1898 - DNA, 18 bp, Artificial Sequence
  Description of Artificial Sequence: Synthetic oligonucleotide
gctgaggtctcataaaat

SEQ ID NO: 1899 - DNA, 18 bp, Artificial Sequence
  Description of Artificial Sequence: Synthetic oligonucleotide
aagaagctgaggtctcat

SEQ ID NO: 1900 - DNA, 18 bp, Artificial Sequence
  Description of Artificial Sequence: Synthetic oligonucleotide
actaaaagaagctgaggt

SEQ ID NO: 1901 - DNA, 18 bp, Artificial Sequence
  Description of Artificial Sequence: Synthetic oligonucleotide
tcagtactaaaagaagct

SEQ ID NO: 1902 - DNA, 18 bp, Artificial Sequence
  Description of Artificial Sequence: Synthetic oligonucleotide
atacttcagtactaaaag

SEQ ID NO: 1903 - DNA, 18 bp, Artificial Sequence
  Description of Artificial Sequence: Synthetic oligonucleotide
tagcaatacttcagtact

SEQ ID NO: 1904 - DNA, 18 bp, Artificial Sequence
  Description of Artificial Sequence: Synthetic oligonucleotide
ggttgtagcaatacttca

SEQ ID NO: 1905 - DNA, 18 bp, Artificial Sequence
  Description of Artificial Sequence: Synthetic oligonucleotide
aggaaggttgtagcaata

SEQ ID NO: 1906 - DNA, 18 bp, Artificial Sequence
  Description of Artificial Sequence: Synthetic oligonucleotide
ctgaaaggaaggttgtag

SEQ ID NO: 1907 - DNA, 18 bp, Artificial Sequence
  Description of Artificial Sequence: Synthetic oligonucleotide
agcctgaaaggaaggttg

SEQ ID NO: 1908 - DNA, 18 bp, Artificial Sequence
  Description of Artificial Sequence: Synthetic oligonucleotide
tcagaagcctgaaaggaa

SEQ ID NO: 1909 - DNA, 18 bp, Artificial Sequence
  Description of Artificial Sequence: Synthetic oligonucleotide
caacatcagaagcctgaa

SEQ ID NO: 1910 - DNA, 18 bp, Artificial Sequence
  Description of Artificial Sequence: Synthetic oligonucleotide
ggtgtcaacatcagaagc

SEQ ID NO: 1911 - DNA, 18 bp, Artificial Sequence
  Description of Artificial Sequence: Synthetic oligonucleotide
agcaaggtgtcaacatca

SEQ ID NO: 1912 - DNA, 18 bp, Artificial Sequence
  Description of Artificial Sequence: Synthetic oligonucleotide
ttttaagcaaggtgtcaa

SEQ ID NO: 1913 - DNA, 18 bp, Artificial Sequence
  Description of Artificial Sequence: Synthetic oligonucleotide
aacagttttaagcaaggt

SEQ ID NO: 1914 - DNA, 18 bp, Artificial Sequence
  Description of Artificial Sequence: Synthetic oligonucleotide
ggaagaacagttttaagc

SEQ ID NO: 1915 - DNA, 18 bp, Artificial Sequence
  Description of Artificial Sequence: Synthetic oligonucleotide
cagctggaagaacagttt

SEQ ID NO: 1916 - DNA, 18 bp, Artificial Sequence
  Description of Artificial Sequence: Synthetic oligonucleotide
gggcacagctggaagaac

SEQ ID NO: 1917 - DNA, 18 bp, Artificial Sequence
  Description of Artificial Sequence: Synthetic oligonucleotide
tcactgggcacagctgga

SEQ ID NO: 1918 - DNA, 18 bp, Artificial Sequence
  Description of Artificial Sequence: Synthetic oligonucleotide
ttggatcactgggcacag

SEQ ID NO: 1919 - DNA, 18 bp, Artificial Sequence
  Description of Artificial Sequence: Synthetic oligonucleotide
caatattggatcactggg

SEQ ID NO: 1920 - DNA, 18 bp, Artificial Sequence
  Description of Artificial Sequence: Synthetic oligonucleotide
tcaaccaatattggatca

SEQ ID NO: 1921 - DNA, 18 bp, Artificial Sequence
  Description of Artificial Sequence: Synthetic oligonucleotide
gggtttcaaccaatattg

SEQ ID NO: 1922 - DNA, 18 bp, Artificial Sequence
  Description of Artificial Sequence: Synthetic oligonucleotide
tttgggggtttcaaccaa

SEQ ID NO: 1923 - DNA, 18 bp, Artificial Sequence
  Description of Artificial Sequence: Synthetic oligonucleotide
tcaactttgggggtttca

SEQ ID NO: 1924 - DNA, 18 bp, Artificial Sequence
  Description of Artificial Sequence: Synthetic oligonucleotide
ttttatcaactttggggg

SEQ ID NO: 1925 - DNA, 18 bp, Artificial Sequence
  Description of Artificial Sequence: Synthetic oligonucleotide
actaattttatcaacttt

SEQ ID NO: 1926 - DNA, 18 bp, Artificial Sequence
  Description of Artificial Sequence: Synthetic oligonucleotide
gtagaactaattttatca

SEQ ID NO: 1927 - DNA, 18 bp, Artificial Sequence
  Description of Artificial Sequence: Synthetic oligonucleotide
acattgtagaactaattt

SEQ ID NO: 1928 - DNA, 18 bp, Artificial Sequence
  Description of Artificial Sequence: Synthetic oligonucleotide
atgcaacattgtagaact

SEQ ID NO: 1929 - DNA, 18 bp, Artificial Sequence
  Description of Artificial Sequence: Synthetic oligonucleotide
atgagatgcaacattgta

SEQ ID NO: 1930 - DNA, 18 bp, Artificial Sequence
  Description of Artificial Sequence: Synthetic oligonucleotide
atacaatgagatgcaaca

SEQ ID NO: 1931 - DNA, 18 bp, Artificial Sequence
  Description of Artificial Sequence: Synthetic oligonucleotide
atttgatacaatgagatg

SEQ ID NO: 1932 - DNA, 18 bp, Artificial Sequence
  Description of Artificial Sequence: Synthetic oligonucleotide
gcagaatttgatacaatg

SEQ ID NO: 1933 - DNA, 18 bp, Artificial Sequence
  Description of Artificial Sequence: Synthetic oligonucleotide
ttgaagcagaatttgata

SEQ ID NO: 1934 - DNA, 18 bp, Artificial Sequence
  Description of Artificial Sequence: Synthetic oligonucleotide
ttcacttgaagcagaatt

SEQ ID NO: 1935 - DNA, 18 bp, Artificial Sequence
  Description of Artificial Sequence: Synthetic oligonucleotide
atgttttcacttgaagca

SEQ ID NO: 1936 - DNA, 18 bp, Artificial Sequence
  Description of Artificial Sequence: Synthetic oligonucleotide
gcagcatgttttcacttg

SEQ ID NO: 1937 - DNA, 18 bp, Artificial Sequence
  Description of Artificial Sequence: Synthetic oligonucleotide
agagtgcagcatgttttc

SEQ ID NO: 1938 - DNA, 18 bp, Artificial Sequence
  Description of Artificial Sequence: Synthetic oligonucleotide
gatgtagagtgcagcatg

SEQ ID NO: 1939 - DNA, 18 bp, Artificial Sequence
  Description of Artificial Sequence: Synthetic oligonucleotide
gtacagatgtagagtgca

SEQ ID NO: 1940 - DNA, 18 bp, Artificial Sequence
  Description of Artificial Sequence: Synthetic oligonucleotide
aactggtacagatgtaga

SEQ ID NO: 1941 - DNA, 18 bp, Artificial Sequence
  Description of Artificial Sequence: Synthetic oligonucleotide
tcaaaaactggtacagat

SEQ ID NO: 1942 - DNA, 18 bp, Artificial Sequence
  Description of Artificial Sequence: Synthetic oligonucleotide
acacatcaaaaactggta

SEQ ID NO: 1943 - DNA, 18 bp, Artificial Sequence
  Description of Artificial Sequence: Synthetic oligonucleotide
aggcgacacatcaaaaac

SEQ ID NO: 1944 - DNA, 18 bp, Artificial Sequence
  Description of Artificial Sequence: Synthetic oligonucleotide
gaagtaggcgacacatca

SEQ ID NO: 1945 - DNA, 18 bp, Artificial Sequence
  Description of Artificial Sequence: Synthetic oligonucleotide
tatgagaagtaggcgaca

SEQ ID NO: 1946 - DNA, 18 bp, Artificial Sequence
  Description of Artificial Sequence: Synthetic oligonucleotide
gtgcatatgagaagtagg

SEQ ID NO: 1947 - DNA, 18 bp, Artificial Sequence
  Description of Artificial Sequence: Synthetic oligonucleotide
gcagagtgcatatgagaa

SEQ ID NO: 1948 - DNA, 18 bp, Artificial Sequence
  Description of Artificial Sequence: Synthetic oligonucleotide
gtgaagcagagtgcatat

SEQ ID NO: 1949 - DNA, 18 bp, Artificial Sequence
  Description of Artificial Sequence: Synthetic oligonucleotide
ttgaagtgaagcagagtg

SEQ ID NO: 1950 - DNA, 18 bp, Artificial Sequence
  Description of Artificial Sequence: Synthetic oligonucleotide
aaaccttgaagtgaagca

SEQ ID NO: 1951 - DNA, 18 bp, Artificial Sequence
  Description of Artificial Sequence: Synthetic oligonucleotide
tggtcaaaccttgaagtg

SEQ ID NO: 1952 - DNA, 18 bp, Artificial Sequence
  Description of Artificial Sequence: Synthetic oligonucleotide
ggaaatggtcaaaccttg

SEQ ID NO: 1953 - DNA, 18 bp, Artificial Sequence
  Description of Artificial Sequence: Synthetic oligonucleotide
gcataggaaatggtcaaa

SEQ ID NO: 1954 - DNA, 18 bp, Artificial Sequence
  Description of Artificial Sequence: Synthetic oligonucleotide
cacttgcataggaaatgg

SEQ ID NO: 1955 - DNA, 18 bp, Artificial Sequence
  Description of Artificial Sequence: Synthetic oligonucleotide
tttctcacttgcatagga

SEQ ID NO: 1956 - DNA, 18 bp, Artificial Sequence
  Description of Artificial Sequence: Synthetic oligonucleotide
tcatatttctcacttgca

SEQ ID NO: 1957 - DNA, 18 bp, Artificial Sequence
  Description of Artificial Sequence: Synthetic oligonucleotide
ctggttcatatttctcac

SEQ ID NO: 1958 - DNA, 18 bp, Artificial Sequence
  Description of Artificial Sequence: Synthetic oligonucleotide
caaaactggttcatattt

SEQ ID NO: 1959 - DNA, 18 bp, Artificial Sequence
  Description of Artificial Sequence: Synthetic oligonucleotide
tttaacaaaactggttca

SEQ ID NO: 1960 - DNA, 18 bp, Artificial Sequence
  Description of Artificial Sequence: Synthetic oligonucleotide
cactttttaacaaaactg

SEQ ID NO: 1961 - DNA, 18 bp, Artificial Sequence
  Description of Artificial Sequence: Synthetic oligonucleotide
actttcactttttaacaa

SEQ ID NO: 1962 - DNA, 18 bp, Artificial Sequence
  Description of Artificial Sequence: Synthetic oligonucleotide
tgggaactttcacttttt

SEQ ID NO: 1963 - DNA, 18 bp, Artificial Sequence
  Description of Artificial Sequence: Synthetic oligonucleotide
cttggtgggaactttcac

SEQ ID NO: 1964 - DNA, 18 bp, Artificial Sequence
  Description of Artificial Sequence: Synthetic oligonucleotide
taccacttggtgggaact

SEQ ID NO: 1965 - DNA, 18 bp, Artificial Sequence
  Description of Artificial Sequence: Synthetic oligonucleotide
gaaggtaccacttggtgg

SEQ ID NO: 1966 - DNA, 18 bp, Artificial Sequence
  Description of Artificial Sequence: Synthetic oligonucleotide
acaaagaaggtaccactt

SEQ ID NO: 1967 - DNA, 18 bp, Artificial Sequence
  Description of Artificial Sequence: Synthetic oligonucleotide
actgtacaaagaaggtac

SEQ ID NO: 1968 - DNA, 18 bp, Artificial Sequence
  Description of Artificial Sequence: Synthetic oligonucleotide
tcattactgtacaaagaa

SEQ ID NO: 1969 - DNA, 18 bp, Artificial Sequence
  Description of Artificial Sequence: Synthetic oligonucleotide
actcatcattactgtaca

SEQ ID NO: 1970 - DNA, 18 bp, Artificial Sequence
  Description of Artificial Sequence: Synthetic oligonucleotide
gaacaactcatcattact

SEQ ID NO: 1971 - DNA, 18 bp, Artificial Sequence
  Description of Artificial Sequence: Synthetic oligonucleotide
gtttggaacaactcatca

SEQ ID NO: 1972 - DNA, 18 bp, Artificial Sequence
  Description of Artificial Sequence: Synthetic oligonucleotide
tggccgtttggaacaact

SEQ ID NO: 1973 - DNA, 18 bp, Artificial Sequence
  Description of Artificial Sequence: Synthetic oligonucleotide
caaattggccgtttggaa

SEQ ID NO: 1974 - DNA, 18 bp, Artificial Sequence
  Description of Artificial Sequence: Synthetic oligonucleotide
atctccaaattggccgtt

SEQ ID NO: 1975 - DNA, 18 bp, Artificial Sequence
  Description of Artificial Sequence: Synthetic oligonucleotide
ggttaatctccaaattgg

SEQ ID NO: 1976 - DNA, 18 bp, Artificial Sequence
  Description of Artificial Sequence: Synthetic oligonucleotide
ggcctggttaatctccaa

SEQ ID NO: 1977 - DNA, 18 bp, Artificial Sequence
  Description of Artificial Sequence: Synthetic oligonucleotide
ggatgggcctggttaatc

SEQ ID NO: 1978 - DNA, 18 bp, Artificial Sequence
  Description of Artificial Sequence: Synthetic oligonucleotide
ttgggggatgggcctggt

SEQ ID NO: 1979 - DNA, 18 bp, Artificial Sequence
  Description of Artificial Sequence: Synthetic oligonucleotide
tccttttgggggatgggc

SEQ ID NO: 1980 - DNA, 18 bp, Artificial Sequence
  Description of Artificial Sequence: Synthetic oligonucleotide
tgccttccttttggggga

SEQ ID NO: 1981 - DNA, 18 bp, Artificial Sequence
  Description of Artificial Sequence: Synthetic oligonucleotide
atacatgccttccttttg

SEQ ID NO: 1982 - DNA, 18 bp, Artificial Sequence
  Description of Artificial Sequence: Synthetic oligonucleotide
agcaaatacatgccttcc

SEQ ID NO: 1983 - DNA, 18 bp, Artificial Sequence
  Description of Artificial Sequence: Synthetic oligonucleotide
ggtgtagcaaatacatgc

SEQ ID NO: 1984 - DNA, 18 bp, Artificial Sequence
  Description of Artificial Sequence: Synthetic oligonucleotide
aaacaggtgtagcaaata

SEQ ID NO: 1985 - DNA, 18 bp, Artificial Sequence
  Description of Artificial Sequence: Synthetic oligonucleotide
tgataaaacaggtgtagc

SEQ ID NO: 1986 - DNA, 18 bp, Artificial Sequence
  Description of Artificial Sequence: Synthetic oligonucleotide
tcaattgataaaacaggt

SEQ ID NO: 1987 - DNA, 18 bp, Artificial Sequence
  Description of Artificial Sequence: Synthetic oligonucleotide
gttcatcaattgataaaa

SEQ ID NO: 1988 - DNA, 18 bp, Artificial Sequence
  Description of Artificial Sequence: Synthetic oligonucleotide
taatggttcatcaattga

SEQ ID NO: 1989 - DNA, 18 bp, Artificial Sequence
  Description of Artificial Sequence: Synthetic oligonucleotide
gtatttaatggttcatca

SEQ ID NO: 1990 - DNA, 18 bp, Artificial Sequence
  Description of Artificial Sequence: Synthetic oligonucleotide
ttagtgtatttaatggtt

SEQ ID NO: 1991 - DNA, 18 bp, Artificial Sequence
  Description of Artificial Sequence: Synthetic oligonucleotide
atttattagtgtatttaa

SEQ ID NO: 1992 - DNA, 18 bp, Artificial Sequence
  Description of Artificial Sequence: Synthetic oligonucleotide
agcttatttattagtgta

SEQ ID NO: 1993 - DNA, 18 bp, Artificial Sequence
  Description of Artificial Sequence: Synthetic oligonucleotide
gtataagcttatttatta

SEQ ID NO: 1994 - DNA, 18 bp, Artificial Sequence
  Description of Artificial Sequence: Synthetic oligonucleotide
ggaatgtataagcttatt

SEQ ID NO: 1995 - DNA, 18 bp, Artificial Sequence
  Description of Artificial Sequence: Synthetic oligonucleotide
tcatcggaatgtataagc

SEQ ID NO: 1996 - DNA, 18 bp, Artificial Sequence
  Description of Artificial Sequence: Synthetic oligonucleotide
aaatttcatcggaatgta

SEQ ID NO: 1997 - DNA, 18 bp, Artificial Sequence
  Description of Artificial Sequence: Synthetic oligonucleotide
ggttaaaatttcatcgga

SEQ ID NO: 1998 - DNA, 18 bp, Artificial Sequence
  Description of Artificial Sequence: Synthetic oligonucleotide
gtggaggttaaaatttca

SEQ ID NO: 1999 - DNA, 18 bp, Artificial Sequence
  Description of Artificial Sequence: Synthetic oligonucleotide
ttttggtggaggttaaaa

SEQ ID NO: 2000 - DNA, 18 bp, Artificial Sequence
  Description of Artificial Sequence: Synthetic oligonucleotide
agaacttttggtggaggt

SEQ ID NO: 2001 - DNA, 18 bp, Artificial Sequence
  Description of Artificial Sequence: Synthetic oligonucleotide
gtaacagaacttttggtg

SEQ ID NO: 2002 - DNA, 18 bp, Artificial Sequence
  Description of Artificial Sequence: Synthetic oligonucleotide
taccagtaacagaacttt

SEQ ID NO: 2003 - DNA, 18 bp, Artificial Sequence
  Description of Artificial Sequence: Synthetic oligonucleotide
taccttaccagtaacaga

SEQ ID NO: 2004 - DNA, 18 bp, Artificial Sequence
  Description of Artificial Sequence: Synthetic oligonucleotide
gcaaataccttaccagta

SEQ ID NO: 2005 - DNA, 18 bp, Artificial Sequence
  Description of Artificial Sequence: Synthetic oligonucleotide
taccagcaaataccttac

SEQ ID NO: 2006 - DNA, 18 bp, Artificial Sequence
  Description of Artificial Sequence: Synthetic oligonucleotide
tggaataccagcaaatac

SEQ ID NO: 2007 - DNA, 18 bp, Artificial Sequence
  Description of Artificial Sequence: Synthetic oligonucleotide
actgttggaataccagca

SEQ ID NO: 2008 - DNA, 18 bp, Artificial Sequence
  Description of Artificial Sequence: Synthetic oligonucleotide
aagcaactgttggaatac

SEQ ID NO: 2009 - DNA, 18 bp, Artificial Sequence
  Description of Artificial Sequence: Synthetic oligonucleotide
atcagaagcaactgttgg

SEQ ID NO: 2010 - DNA, 18 bp, Artificial Sequence
  Description of Artificial Sequence: Synthetic oligonucleotide
aatgtatcagaagcaact

SEQ ID NO: 2011 - DNA, 18 bp, Artificial Sequence
  Description of Artificial Sequence: Synthetic oligonucleotide
atacaaatgtatcagaag

SEQ ID NO: 2012 - DNA, 18 bp, Artificial Sequence
  Description of Artificial Sequence: Synthetic oligonucleotide
agtagatacaaatgtatc

SEQ ID NO: 2013 - DNA, 18 bp, Artificial Sequence
  Description of Artificial Sequence: Synthetic oligonucleotide
tgatcagtagatacaaat

SEQ ID NO: 2014 - DNA, 18 bp, Artificial Sequence
  Description of Artificial Sequence: Synthetic oligonucleotide
cagaatgatcagtagata

SEQ ID NO: 2015 - DNA, 18 bp, Artificial Sequence
  Description of Artificial Sequence: Synthetic oligonucleotide
aggaacagaatgatcagt

SEQ ID NO: 2016 - DNA, 18 bp, Artificial Sequence
  Description of Artificial Sequence: Synthetic oligonucleotide
cctataggaacagaatga

SEQ ID NO: 2017 - DNA, 18 bp, Artificial Sequence
  Description of Artificial Sequence: Synthetic oligonucleotide
catttcctataggaacag

SEQ ID NO: 2018 - DNA, 18 bp, Artificial Sequence
  Description of Artificial Sequence: Synthetic oligonucleotide
atgcccatttcctatagg

SEQ ID NO: 2019 - DNA, 18 bp, Artificial Sequence
  Description of Artificial Sequence: Synthetic oligonucleotide
gcaacatgcccatttcct

SEQ ID NO: 2020 - DNA, 18 bp, Artificial Sequence
  Description of Artificial Sequence: Synthetic oligonucleotide
taatggcaacatgcccat

SEQ ID NO: 2021 - DNA, 18 bp, Artificial Sequence
  Description of Artificial Sequence: Synthetic oligonucleotide
agctgtaatggcaacatg

SEQ ID NO: 2022 - DNA, 18 bp, Artificial Sequence
  Description of Artificial Sequence: Synthetic oligonucleotide
gaaacagctgtaatggca

SEQ ID NO: 2023 - DNA, 18 bp, Artificial Sequence
  Description of Artificial Sequence: Synthetic oligonucleotide
ggggagaaacagctgtaa

SEQ ID NO: 2024 - DNA, 18 bp, Artificial Sequence
  Description of Artificial Sequence: Synthetic oligonucleotide
tctgtggggagaaacagc

SEQ ID NO: 2025 - DNA, 18 bp, Artificial Sequence
  Description of Artificial Sequence: Synthetic oligonucleotide
ccatctctgtggggagaa

SEQ ID NO: 2026 - DNA, 18 bp, Artificial Sequence
  Description of Artificial Sequence: Synthetic oligonucleotide
cagaaccatctctgtggg

SEQ ID NO: 2027 - DNA, 18 bp, Artificial Sequence
  Description of Artificial Sequence: Synthetic oligonucleotide
ggttacagaaccatctct

SEQ ID NO: 2028 - DNA, 18 bp, Artificial Sequence
  Description of Artificial Sequence: Synthetic oligonucleotide
gttgaggttacagaacca

SEQ ID NO: 2029 - DNA, 18 bp, Artificial Sequence
  Description of Artificial Sequence: Synthetic oligonucleotide
actttgttgaggttacag

SEQ ID NO: 2030 - DNA, 18 bp, Artificial Sequence
  Description of Artificial Sequence: Synthetic oligonucleotide
cagcaactttgttgaggt

SEQ ID NO: 2031 - DNA, 18 bp, Artificial Sequence
  Description of Artificial Sequence: Synthetic oligonucleotide
ggaaacagcaactttgtt

SEQ ID NO: 2032 - DNA, 18 bp, Artificial Sequence
  Description of Artificial Sequence: Synthetic oligonucleotide
tagaaggaaacagcaact

SEQ ID NO: 2033 - DNA, 18 bp, Artificial Sequence
  Description of Artificial Sequence: Synthetic oligonucleotide
tgccttagaaggaaacag

SEQ ID NO: 2034 - DNA, 18 bp, Artificial Sequence
  Description of Artificial Sequence: Synthetic oligonucleotide
gaagttgccttagaagga

SEQ ID NO: 2035 - DNA, 18 bp, Artificial Sequence
  Description of Artificial Sequence: Synthetic oligonucleotide
gctcagaagttgccttag

SEQ ID NO: 2036 - DNA, 18 bp, Artificial Sequence
  Description of Artificial Sequence: Synthetic oligonucleotide
actcagctcagaagttgc

SEQ ID NO: 2037 - DNA, 18 bp, Artificial Sequence
  Description of Artificial Sequence: Synthetic oligonucleotide
ctatgactcagctcagaa

SEQ ID NO: 2038 - DNA, 18 bp, Artificial Sequence
  Description of Artificial Sequence: Synthetic oligonucleotide
tggcactatgactcagct

SEQ ID NO: 2039 - DNA, 18 bp, Artificial Sequence
  Description of Artificial Sequence: Synthetic oligonucleotide
agatttggcactatgact

SEQ ID NO: 2040 - DNA, 18 bp, Artificial Sequence
  Description of Artificial Sequence: Synthetic oligonucleotide
aactccatcgctgaggcc

SEQ ID NO: 2041 - DNA, 18 bp, Artificial Sequence
  Description of Artificial Sequence: Synthetic oligonucleotide
ccggcaactccatcgctg

SEQ ID NO: 2042 - DNA, 18 bp, Artificial Sequence
  Description of Artificial Sequence: Synthetic oligonucleotide
tggccccggcaactccat

SEQ ID NO: 2043 - DNA, 18 bp, Artificial Sequence
  Description of Artificial Sequence: Synthetic oligonucleotide
gcaggtggccccggcaac

SEQ ID NO: 2044 - DNA, 18 bp, Artificial Sequence
  Description of Artificial Sequence: Synthetic oligonucleotide
aggtcgcaggtggccccg

SEQ ID NO: 2045 - DNA, 18 bp, Artificial Sequence
  Description of Artificial Sequence: Synthetic oligonucleotide
catggaggtcgcaggtgg

SEQ ID NO: 2046 - DNA, 18 bp, Artificial Sequence
  Description of Artificial Sequence: Synthetic oligonucleotide
tccggcatggaggtcgca

SEQ ID NO: 2047 - DNA, 18 bp, Artificial Sequence
  Description of Artificial Sequence: Synthetic oligonucleotide
gcaactccggcatggagg

SEQ ID NO: 2048 - DNA, 18 bp, Artificial Sequence
  Description of Artificial Sequence: Synthetic oligonucleotide
cccctgcaactccggcat

SEQ ID NO: 2049 - DNA, 18 bp, Artificial Sequence
  Description of Artificial Sequence: Synthetic oligonucleotide
gggggcccctgcaactcc

SEQ ID NO: 2050 - DNA, 18 bp, Artificial Sequence
  Description of Artificial Sequence: Synthetic oligonucleotide
tcacagggggcccctgca

SEQ ID NO: 2051 - DNA, 18 bp, Artificial Sequence
  Description of Artificial Sequence: Synthetic oligonucleotide
tggagtcacagggggccc

SEQ ID NO: 2052 - DNA, 18 bp, Artificial Sequence
  Description of Artificial Sequence: Synthetic oligonucleotide
agcactggagtcacaggg

SEQ ID NO: 2053 - DNA, 18 bp, Artificial Sequence
  Description of Artificial Sequence: Synthetic oligonucleotide
actccagcactggagtca

SEQ ID NO: 2054 - DNA, 18 bp, Artificial Sequence
  Description of Artificial Sequence: Synthetic oligonucleotide
aggtaactccagcactgg

SEQ ID NO: 2055 - DNA, 18 bp, Artificial Sequence
  Description of Artificial Sequence: Synthetic oligonucleotide
ggcccaggtaactccagc

SEQ ID NO: 2056 - DNA, 18 bp, Artificial Sequence
  Description of Artificial Sequence: Synthetic oligonucleotide
cagagggcccaggtaact

SEQ ID NO: 2057 - DNA, 18 bp, Artificial Sequence
  Description of Artificial Sequence: Synthetic oligonucleotide
ggtagcagagggcccagg

SEQ ID NO: 2058 - DNA, 18 bp, Artificial Sequence
  Description of Artificial Sequence: Synthetic oligonucleotide
accggggtagcagagggc

SEQ ID NO: 2059 - DNA, 18 bp, Artificial Sequence
  Description of Artificial Sequence: Synthetic oligonucleotide
ctggcaccggggtagcag

SEQ ID NO: 2060 - DNA, 18 bp, Artificial Sequence
  Description of Artificial Sequence: Synthetic oligonucleotide
caactctggcaccggggt

SEQ ID NO: 2061 - DNA, 18 bp, Artificial Sequence
  Description of Artificial Sequence: Synthetic oligonucleotide
cctggcaactctggcacc

SEQ ID NO: 2062 - DNA, 18 bp, Artificial Sequence
  Description of Artificial Sequence: Synthetic oligonucleotide
ggggccctggcaactctg

SEQ ID NO: 2063 - DNA, 18 bp, Artificial Sequence
  Description of Artificial Sequence: Synthetic oligonucleotide
agaaaggggccctggcaa

SEQ ID NO: 2064 - DNA, 18 bp, Artificial Sequence
  Description of Artificial Sequence: Synthetic oligonucleotide
ggggtagaaaggggccct

SEQ ID NO: 2065 - DNA, 18 bp, Artificial Sequence
  Description of Artificial Sequence: Synthetic oligonucleotide
gcactggggtagaaaggg

SEQ ID NO: 2066 - DNA, 18 bp, Artificial Sequence
  Description of Artificial Sequence: Synthetic oligonucleotide
ctcaggcactggggtaga

SEQ ID NO: 2067 - DNA, 18 bp, Artificial Sequence
  Description of Artificial Sequence: Synthetic oligonucleotide
ggcaactcaggcactggg

SEQ ID NO: 2068 - DNA, 18 bp, Artificial Sequence
  Description of Artificial Sequence: Synthetic oligonucleotide
gccctggcaactcaggca

SEQ ID NO: 2069 - DNA, 18 bp, Artificial Sequence
  Description of Artificial Sequence: Synthetic oligonucleotide
agggggccctggcaactc

SEQ ID NO: 2070 - DNA, 18 bp, Artificial Sequence
  Description of Artificial Sequence: Synthetic oligonucleotide
gtcgcagggggccctggc

SEQ ID NO: 2071 - DNA, 18 bp, Artificial Sequence
  Description of Artificial Sequence: Synthetic oligonucleotide
ctgctgtcgcagggggcc

SEQ ID NO: 2072 - DNA, 18 bp, Artificial Sequence
  Description of Artificial Sequence: Synthetic oligonucleotide
aggcactgctgtcgcagg

SEQ ID NO: 2073 - DNA, 18 bp, Artificial Sequence
  Description of Artificial Sequence: Synthetic oligonucleotide
aactcaggcactgctgtc

SEQ ID NO: 2074 - DNA, 18 bp, Artificial Sequence
  Description of Artificial Sequence: Synthetic oligonucleotide
ctggcaactcaggcactg

SEQ ID NO: 2075 - DNA, 18 bp, Artificial Sequence
  Description of Artificial Sequence: Synthetic oligonucleotide
gggccctggcaactcagg

SEQ ID NO: 2076 - DNA, 18 bp, Artificial Sequence
  Description of Artificial Sequence: Synthetic oligonucleotide
acagagggccctggcaac

SEQ ID NO: 2077 - DNA, 18 bp, Artificial Sequence
  Description of Artificial Sequence: Synthetic oligonucleotide
gtgtcacagagggccctg

SEQ ID NO: 2078 - DNA, 18 bp, Artificial Sequence
  Description of Artificial Sequence: Synthetic oligonucleotide
cactggtgtcacagaggg

SEQ ID NO: 2079 - DNA, 18 bp, Artificial Sequence
  Description of Artificial Sequence: Synthetic oligonucleotide
tgtggcactggtgtcaca

SEQ ID NO: 2080 - DNA, 18 bp, Artificial Sequence
  Description of Artificial Sequence: Synthetic oligonucleotide
acaactgtggcactggtg

SEQ ID NO: 2081 - DNA, 18 bp, Artificial Sequence
  Description of Artificial Sequence: Synthetic oligonucleotide
ctgcgacaactgtggcac

SEQ ID NO: 2082 - DNA, 18 bp, Artificial Sequence
  Description of Artificial Sequence: Synthetic oligonucleotide
aattcctgcgacaactgt

SEQ ID NO: 2083 - DNA, 18 bp, Artificial Sequence
  Description of Artificial Sequence: Synthetic oligonucleotide
ctggcaattcctgcgaca

SEQ ID NO: 2084 - DNA, 18 bp, Artificial Sequence
  Description of Artificial Sequence: Synthetic oligonucleotide
aagccctggcaattcctg

SEQ ID NO: 2085 - DNA, 18 bp, Artificial Sequence
  Description of Artificial Sequence: Synthetic oligonucleotide
gctggaagccctggcaat

SEQ ID NO: 2086 - DNA, 18 bp, Artificial Sequence
  Description of Artificial Sequence: Synthetic oligonucleotide
atggtgctggaagccctg

SEQ ID NO: 2087 - DNA, 18 bp, Artificial Sequence
  Description of Artificial Sequence: Synthetic oligonucleotide
catggatggtgctggaag

SEQ ID NO: 2088 - DNA, 18 bp, Artificial Sequence
  Description of Artificial Sequence: Synthetic oligonucleotide
aaccccatggatggtgct

SEQ ID NO: 2089 - DNA, 18 bp, Artificial Sequence
  Description of Artificial Sequence: Synthetic oligonucleotide
gctccaaccccatggatg

SEQ ID NO: 2090 - DNA, 18 bp, Artificial Sequence
  Description of Artificial Sequence: Synthetic oligonucleotide
tggtggctccaaccccat

SEQ ID NO: 2091 - DNA, 18 bp, Artificial Sequence
  Description of Artificial Sequence: Synthetic oligonucleotide
tcctgtggtggctccaac

SEQ ID NO: 2092 - DNA, 18 bp, Artificial Sequence
  Description of Artificial Sequence: Synthetic oligonucleotide
gtacctcctgtggtggct

SEQ ID NO: 2093 - DNA, 18 bp, Artificial Sequence
  Description of Artificial Sequence: Synthetic oligonucleotide
ctctggtacctcctgtgg

SEQ ID NO: 2094 - DNA, 18 bp, Artificial Sequence
  Description of Artificial Sequence: Synthetic oligonucleotide
ggtggctctggtacctcc

SEQ ID NO: 2095 - DNA, 18 bp, Artificial Sequence
  Description of Artificial Sequence: Synthetic oligonucleotide
tcacaggtggctctggta

SEQ ID NO: 2096 - DNA, 18 bp, Artificial Sequence
  Description of Artificial Sequence: Synthetic oligonucleotide
tgccatcacaggtggctc

SEQ ID NO: 2097 - DNA, 18 bp, Artificial Sequence
  Description of Artificial Sequence: Synthetic oligonucleotide
tcctgtgccatcacaggt

SEQ ID NO: 2098 - DNA, 18 bp, Artificial Sequence
  Description of Artificial Sequence: Synthetic oligonucleotide
gcaactcctgtgccatca

SEQ ID NO: 2099 - DNA, 18 bp, Artificial Sequence
  Description of Artificial Sequence: Synthetic oligonucleotide
ccctggcaactcctgtgc

SEQ ID NO: 2100 - DNA, 18 bp, Artificial Sequence
  Description of Artificial Sequence: Synthetic oligonucleotide
ggcagccctggcaactcc

SEQ ID NO: 2101 - DNA, 18 bp, Artificial Sequence
  Description of Artificial Sequence: Synthetic oligonucleotide
ccaaaggcagccctggca

SEQ ID NO: 2102 - DNA, 18 bp, Artificial Sequence
  Description of Artificial Sequence: Synthetic oligonucleotide
tgtcaccaaaggcagccc

SEQ ID NO: 2103 - DNA, 18 bp, Artificial Sequence
  Description of Artificial Sequence: Synthetic oligonucleotide
gctgctgtcaccaaaggc

SEQ ID NO: 2104 - DNA, 18 bp, Artificial Sequence
  Description of Artificial Sequence: Synthetic oligonucleotide
ctactgctgctgtcacca

SEQ ID NO: 2105 - DNA, 18 bp, Artificial Sequence
  Description of Artificial Sequence: Synthetic oligonucleotide
caactctactgctgctgt

SEQ ID NO: 2106 - DNA, 18 bp, Artificial Sequence
  Description of Artificial Sequence: Synthetic oligonucleotide
tctggcaactctactgct

SEQ ID NO: 2107 - DNA, 18 bp, Artificial Sequence
  Description of Artificial Sequence: Synthetic oligonucleotide
gctgctctggcaactcta

SEQ ID NO: 2108 - DNA, 18 bp, Artificial Sequence
  Description of Artificial Sequence: Synthetic oligonucleotide
cgcaggctgctctggcaa

SEQ ID NO: 2109 - DNA, 18 bp, Artificial Sequence
  Description of Artificial Sequence: Synthetic oligonucleotide
gttaccgcaggctgctct

SEQ ID NO: 2110 - DNA, 18 bp, Artificial Sequence
  Description of Artificial Sequence: Synthetic oligonucleotide
ctactgttaccgcaggct

SEQ ID NO: 2111 - DNA, 18 bp, Artificial Sequence
  Description of Artificial Sequence: Synthetic oligonucleotide
cattgctactgttaccgc

SEQ ID NO: 2112 - DNA, 18 bp, Artificial Sequence
  Description of Artificial Sequence: Synthetic oligonucleotide
aactccattgctactgtt

SEQ ID NO: 2113 - DNA, 18 bp, Artificial Sequence
  Description of Artificial Sequence: Synthetic oligonucleotide
cggtcaactccattgcta

SEQ ID NO: 2114 - DNA, 18 bp, Artificial Sequence
  Description of Artificial Sequence: Synthetic oligonucleotide
ttgttcggtcaactccat

SEQ ID NO: 2115 - DNA, 18 bp, Artificial Sequence
  Description of Artificial Sequence: Synthetic oligonucleotide
acaggttgttcggtcaac

SEQ ID NO: 2116 - DNA, 18 bp, Artificial Sequence
  Description of Artificial Sequence: Synthetic oligonucleotide
tcgtcacaggttgttcgg

SEQ ID NO: 2117 - DNA, 18 bp, Artificial Sequence
  Description of Artificial Sequence: Synthetic oligonucleotide
tgtcgtcgtcacaggttg

SEQ ID NO: 2118 - DNA, 18 bp, Artificial Sequence
  Description of Artificial Sequence: Synthetic oligonucleotide
aactctgtcgtcgtcaca

SEQ ID NO: 2119 - DNA, 18 bp, Artificial Sequence
  Description of Artificial Sequence: Synthetic oligonucleotide
gctccaactctgtcgtcg

SEQ ID NO: 2120 - DNA, 18 bp, Artificial Sequence
  Description of Artificial Sequence: Synthetic oligonucleotide
aggctgctccaactctgt

SEQ ID NO: 2121 - DNA, 18 bp, Artificial Sequence
  Description of Artificial Sequence: Synthetic oligonucleotide
cccacaggctgctccaac

SEQ ID NO: 2122 - DNA, 18 bp, Artificial Sequence
  Description of Artificial Sequence: Synthetic oligonucleotide
tcatccccacaggctgct

SEQ ID NO: 2123 - DNA, 18 bp, Artificial Sequence
  Description of Artificial Sequence: Synthetic oligonucleotide
cgttgtcatccccacagg

SEQ ID NO: 2124 - DNA, 18 bp, Artificial Sequence
  Description of Artificial Sequence: Synthetic oligonucleotide
tccaccgttgtcatcccc

SEQ ID NO: 2125 - DNA, 18 bp, Artificial Sequence
  Description of Artificial Sequence: Synthetic oligonucleotide
gatgttccaccgttgtca

SEQ ID NO: 2126 - DNA, 18 bp, Artificial Sequence
  Description of Artificial Sequence: Synthetic oligonucleotide
cccaggatgttccaccgt

SEQ ID NO: 2127 - DNA, 18 bp, Artificial Sequence
  Description of Artificial Sequence: Synthetic oligonucleotide
ggatgcccaggatgttcc

SEQ ID NO: 2128 - DNA, 18 bp, Artificial Sequence
  Description of Artificial Sequence: Synthetic oligonucleotide
cctcaggatgcccaggat

SEQ ID NO: 2129 - DNA, 18 bp, Artificial Sequence
  Description of Artificial Sequence: Synthetic oligonucleotide
tgtcacctcaggatgccc

SEQ ID NO: 2130 - DNA, 18 bp, Artificial Sequence
  Description of Artificial Sequence: Synthetic oligonucleotide
gccgttgtcacctcagga

SEQ ID NO: 2131 - DNA, 18 bp, Artificial Sequence
  Description of Artificial Sequence: Synthetic oligonucleotide
ctgttgccgttgtcacct

SEQ ID NO: 2132 - DNA, 18 bp, Artificial Sequence
  Description of Artificial Sequence: Synthetic oligonucleotide
caaccctgttgccgttgt

SEQ ID NO: 2133 - DNA, 18 bp, Artificial Sequence
  Description of Artificial Sequence: Synthetic oligonucleotide
cccagcaaccctgttgcc

SEQ ID NO: 2134 - DNA, 18 bp, Artificial Sequence
  Description of Artificial Sequence: Synthetic oligonucleotide
gctgccccagcaaccctg

SEQ ID NO: 2135 - DNA, 18 bp, Artificial Sequence
  Description of Artificial Sequence: Synthetic oligonucleotide
ctcaggctgccccagcaa

SEQ ID NO: 2136 - DNA, 18 bp, Artificial Sequence
  Description of Artificial Sequence: Synthetic oligonucleotide
gttgcctcaggctgcccc

SEQ ID NO: 2137 - DNA, 18 bp, Artificial Sequence
  Description of Artificial Sequence: Synthetic oligonucleotide
ccatcgttgcctcaggct

SEQ ID NO: 2138 - DNA, 18 bp, Artificial Sequence
  Description of Artificial Sequence: Synthetic oligonucleotide
cagcaccatcgttgcctc

SEQ ID NO: 2139 - DNA, 18 bp, Artificial Sequence
  Description of Artificial Sequence: Synthetic oligonucleotide
aactccagcaccatcgtt

SEQ ID NO: 2140 - DNA, 18 bp, Artificial Sequence
  Description of Artificial Sequence: Synthetic oligonucleotide
ctggcaactccagcacca

SEQ ID NO: 2141 - DNA, 18 bp, Artificial Sequence
  Description of Artificial Sequence: Synthetic oligonucleotide
ctgtcctggcaactccag

SEQ ID NO: 2142 - DNA, 18 bp, Artificial Sequence
  Description of Artificial Sequence: Synthetic oligonucleotide
actggctgtcctggcaac

SEQ ID NO: 2143 - DNA, 18 bp, Artificial Sequence
  Description of Artificial Sequence: Synthetic oligonucleotide
ttgccactggctgtcctg

SEQ ID NO: 2144 - DNA, 18 bp, Artificial Sequence
  Description of Artificial Sequence: Synthetic oligonucleotide
tgtcgttgccactggctg

SEQ ID NO: 2145 - DNA, 18 bp, Artificial Sequence
  Description of Artificial Sequence: Synthetic oligonucleotide
agcgctgtcgttgccact

SEQ ID NO: 2146 - DNA, 18 bp, Artificial Sequence
  Description of Artificial Sequence: Synthetic oligonucleotide
actccagcgctgtcgttg

SEQ ID NO: 2147 - DNA, 18 bp, Artificial Sequence
  Description of Artificial Sequence: Synthetic oligonucleotide
cggcaactccagcgctgt

SEQ ID NO: 2148 - DNA, 18 bp, Artificial Sequence
  Description of Artificial Sequence: Synthetic oligonucleotide
tgccccggcaactccagc

SEQ ID NO: 2149 - DNA, 18 bp, Artificial Sequence
  Description of Artificial Sequence: Synthetic oligonucleotide
aaggctgccccggcaact

SEQ ID NO: 2150 - DNA, 18 bp, Artificial Sequence
  Description of Artificial Sequence: Synthetic oligonucleotide
caccgaaggctgccccgg

SEQ ID NO: 2151 - DNA, 18 bp, Artificial Sequence
  Description of Artificial Sequence: Synthetic oligonucleotide
ccagtcaccgaaggctgc

SEQ ID NO: 2152 - DNA, 18 bp, Artificial Sequence
  Description of Artificial Sequence: Synthetic oligonucleotide
gcaccccagtcaccgaag

SEQ ID NO: 2153 - DNA, 18 bp, Artificial Sequence
  Description of Artificial Sequence: Synthetic oligonucleotide
ctctggcaccccagtcac

SEQ ID NO: 2154 - DNA, 18 bp, Artificial Sequence
  Description of Artificial Sequence: Synthetic oligonucleotide
ggcaactctggcacccca

SEQ ID NO: 2155 - DNA, 18 bp, Artificial Sequence
  Description of Artificial Sequence: Synthetic oligonucleotide
gccctggcaactctggca

SEQ ID NO: 2156 - DNA, 18 bp, Artificial Sequence
  Description of Artificial Sequence: Synthetic oligonucleotide
aggcagccctggcaactc

SEQ ID NO: 2157 - DNA, 18 bp, Artificial Sequence
  Description of Artificial Sequence: Synthetic oligonucleotide
gccgaaggcagccctggc

SEQ ID NO: 2158 - DNA, 18 bp, Artificial Sequence
  Description of Artificial Sequence: Synthetic oligonucleotide
tagttgccgaaggcagcc

SEQ ID NO: 2159 - DNA, 18 bp, Artificial Sequence
  Description of Artificial Sequence: Synthetic oligonucleotide
tgccctagttgccgaagg

SEQ ID NO: 2160 - DNA, 18 bp, Artificial Sequence
  Description of Artificial Sequence: Synthetic oligonucleotide
tccagtgccctagttgcc

SEQ ID NO: 2161 - DNA, 18 bp, Artificial Sequence
  Description of Artificial Sequence: Synthetic oligonucleotide
acaactccagtgccctag

SEQ ID NO: 2162 - DNA, 18 bp, Artificial Sequence
  Description of Artificial Sequence: Synthetic oligonucleotide
ccccgacaactccagtgc

SEQ ID NO: 2163 - DNA, 18 bp, Artificial Sequence
  Description of Artificial Sequence: Synthetic oligonucleotide
ggctgccccgacaactcc

SEQ ID NO: 2164 - DNA, 18 bp, Artificial Sequence
  Description of Artificial Sequence: Synthetic oligonucleotide
ccacaggctgccccgaca

SEQ ID NO: 2165 - DNA, 18 bp, Artificial Sequence
  Description of Artificial Sequence: Synthetic oligonucleotide
agttgccacaggctgccc

SEQ ID NO: 2166 - DNA, 18 bp, Artificial Sequence
  Description of Artificial Sequence: Synthetic oligonucleotide
gccccagttgccacaggc

SEQ ID NO: 2167 - DNA, 18 bp, Artificial Sequence
  Description of Artificial Sequence: Synthetic oligonucleotide
ctagtgccccagttgcca

SEQ ID NO: 2168 - DNA, 18 bp, Artificial Sequence
  Description of Artificial Sequence: Synthetic oligonucleotide
caactctagtgccccagt

SEQ ID NO: 2169 - DNA, 18 bp, Artificial Sequence
  Description of Artificial Sequence: Synthetic oligonucleotide
ccaggcaactctagtgcc

SEQ ID NO: 2170 - DNA, 18 bp, Artificial Sequence
  Description of Artificial Sequence: Synthetic oligonucleotide
gcggcccaggcaactcta

SEQ ID NO: 2171 - DNA, 18 bp, Artificial Sequence
  Description of Artificial Sequence: Synthetic oligonucleotide
catgagcggcccaggcaa

SEQ ID NO: 2172 - DNA, 18 bp, Artificial Sequence
  Description of Artificial Sequence: Synthetic oligonucleotide
gctgccatgagcggccca

SEQ ID NO: 2173 - DNA, 18 bp, Artificial Sequence
  Description of Artificial Sequence: Synthetic oligonucleotide
ccccagctgccatgagcg

SEQ ID NO: 2174 - DNA, 18 bp, Artificial Sequence
  Description of Artificial Sequence: Synthetic oligonucleotide
cagtgccccagctgccat

SEQ ID NO: 2175 - DNA, 18 bp, Artificial Sequence
  Description of Artificial Sequence: Synthetic oligonucleotide
aactccagtgccccagct

SEQ ID NO: 2176 - DNA, 18 bp, Artificial Sequence
  Description of Artificial Sequence: Synthetic oligonucleotide
ccgagaactccagtgccc

SEQ ID NO: 2177 - DNA, 18 bp, Artificial Sequence
  Description of Artificial Sequence: Synthetic oligonucleotide
ctgccccgagaactccag

SEQ ID NO: 2178 - DNA, 18 bp, Artificial Sequence
  Description of Artificial Sequence: Synthetic oligonucleotide
ccagactgccccgagaac

SEQ ID NO: 2179 - DNA, 18 bp, Artificial Sequence
  Description of Artificial Sequence: Synthetic oligonucleotide
ctgccccagactgccccg

SEQ ID NO: 2180 - DNA, 18 bp, Artificial Sequence
  Description of Artificial Sequence: Synthetic oligonucleotide
tccagctgccccagactg

SEQ ID NO: 2181 - DNA, 18 bp, Artificial Sequence
  Description of Artificial Sequence: Synthetic oligonucleotide
agtgctccagctgcccca

SEQ ID NO: 2182 - DNA, 18 bp, Artificial Sequence
  Description of Artificial Sequence: Synthetic oligonucleotide
gctccagtgctccagctg

SEQ ID NO: 2183 - DNA, 18 bp, Artificial Sequence
  Description of Artificial Sequence: Synthetic oligonucleotide
caaaagctccagtgctcc

SEQ ID NO: 2184 - DNA, 18 bp, Artificial Sequence
  Description of Artificial Sequence: Synthetic oligonucleotide
tgccccaaaagctccagt

SEQ ID NO: 2185 - DNA, 18 bp, Artificial Sequence
  Description of Artificial Sequence: Synthetic oligonucleotide
gaggctgccccaaaagct

SEQ ID NO: 2186 - DNA, 18 bp, Artificial Sequence
  Description of Artificial Sequence: Synthetic oligonucleotide
tgccagaggctgccccaa

SEQ ID NO: 2187 - DNA, 18 bp, Artificial Sequence
  Description of Artificial Sequence: Synthetic oligonucleotide
cctgttgccagaggctgc

SEQ ID NO: 2188 - DNA, 18 bp, Artificial Sequence
  Description of Artificial Sequence: Synthetic oligonucleotide
gcacccctgttgccagag

SEQ ID NO: 2189 - DNA, 18 bp, Artificial Sequence
  Description of Artificial Sequence: Synthetic oligonucleotide
ctccagcacccctgttgc

SEQ ID NO: 2190 - DNA, 18 bp, Artificial Sequence
  Description of Artificial Sequence: Synthetic oligonucleotide
ggcaactccagcacccct

SEQ ID NO: 2191 - DNA, 18 bp, Artificial Sequence
  Description of Artificial Sequence: Synthetic oligonucleotide
gccctggcaactccagca

SEQ ID NO: 2192 - DNA, 18 bp, Artificial Sequence
  Description of Artificial Sequence: Synthetic oligonucleotide
aggctgccctggcaactc

SEQ ID NO: 2193 - DNA, 18 bp, Artificial Sequence
  Description of Artificial Sequence: Synthetic oligonucleotide
gccccaggctgccctggc

SEQ ID NO: 2194 - DNA, 18 bp, Artificial Sequence
  Description of Artificial Sequence: Synthetic oligonucleotide
ctggcgccccaggctgcc

SEQ ID NO: 2195 - DNA, 18 bp, Artificial Sequence
  Description of Artificial Sequence: Synthetic oligonucleotide
caactctggcgccccagg

SEQ ID NO: 2196 - DNA, 18 bp, Artificial Sequence
  Description of Artificial Sequence: Synthetic oligonucleotide
ccaggcaactctggcgcc

SEQ ID NO: 2197 - DNA, 18 bp, Artificial Sequence
  Description of Artificial Sequence: Synthetic oligonucleotide
gctgcccaggcaactctg

SEQ ID NO: 2198 - DNA, 18 bp, Artificial Sequence
  Description of Artificial Sequence: Synthetic oligonucleotide
cacaggctgcccaggcaa

SEQ ID NO: 2199 - DNA, 18 bp, Artificial Sequence
  Description of Artificial Sequence: Synthetic oligonucleotide
gttgccacaggctgccca

SEQ ID NO: 2200 - DNA, 18 bp, Artificial Sequence
  Description of Artificial Sequence: Synthetic oligonucleotide
ccacagttgccacaggct

SEQ ID NO: 2201 - DNA, 18 bp, Artificial Sequence
  Description of Artificial Sequence: Synthetic oligonucleotide
cagcgccacagttgccac

SEQ ID NO: 2202 - DNA, 18 bp, Artificial Sequence
  Description of Artificial Sequence: Synthetic oligonucleotide
atctccagcgccacagtt

SEQ ID NO: 2203 - DNA, 18 bp, Artificial Sequence
  Description of Artificial Sequence: Synthetic oligonucleotide
cagagatctccagcgcca

SEQ ID NO: 2204 - DNA, 18 bp, Artificial Sequence
  Description of Artificial Sequence: Synthetic oligonucleotide
ctgaacagagatctccag

SEQ ID NO: 2205 - DNA, 18 bp, Artificial Sequence
  Description of Artificial Sequence: Synthetic oligonucleotide
acagactgaacagagatc

SEQ ID NO: 2206 - DNA, 18 bp, Artificial Sequence
  Description of Artificial Sequence: Synthetic oligonucleotide
tcaccacagactgaacag

SEQ ID NO: 2207 - DNA, 18 bp, Artificial Sequence
  Description of Artificial Sequence: Synthetic oligonucleotide
tgttgtcaccacagactg

SEQ ID NO: 2208 - DNA, 18 bp, Artificial Sequence
  Description of Artificial Sequence: Synthetic oligonucleotide
tccgatgttgtcaccaca

SEQ ID NO: 2209 - DNA, 18 bp, Artificial Sequence
  Description of Artificial Sequence: Synthetic oligonucleotide
acagctccgatgttgtca

SEQ ID NO: 2210 - DNA, 18 bp, Artificial Sequence
  Description of Artificial Sequence: Synthetic oligonucleotide
cgttgacagctccgatgt

SEQ ID NO: 2211 - DNA, 18 bp, Artificial Sequence
  Description of Artificial Sequence: Synthetic oligonucleotide
gtcatcgttgacagctcc

SEQ ID NO: 2212 - DNA, 18 bp, Artificial Sequence
  Description of Artificial Sequence: Synthetic oligonucleotide
acacggtcatcgttgaca

SEQ ID NO: 2213 - DNA, 18 bp, Artificial Sequence
  Description of Artificial Sequence: Synthetic oligonucleotide
ctgcgacacggtcatcgt

SEQ ID NO: 2214 - DNA, 18 bp, Artificial Sequence
  Description of Artificial Sequence: Synthetic oligonucleotide
agggactgcgacacggtc

SEQ ID NO: 2215 - DNA, 18 bp, Artificial Sequence
  Description of Artificial Sequence: Synthetic oligonucleotide
cctccagggactgcgaca

SEQ ID NO: 2216 - DNA, 18 bp, Artificial Sequence
  Description of Artificial Sequence: Synthetic oligonucleotide
gggcacctccagggactg

SEQ ID NO: 2217 - DNA, 18 bp, Artificial Sequence
  Description of Artificial Sequence: Synthetic oligonucleotide
gtcgagggcacctccagg

SEQ ID NO: 2218 - DNA, 18 bp, Artificial Sequence
  Description of Artificial Sequence: Synthetic oligonucleotide
ctgtcgtcgagggcacct

SEQ ID NO: 2219 - DNA, 18 bp, Artificial Sequence
  Description of Artificial Sequence: Synthetic oligonucleotide
cagcgctgtcgtcgaggg

SEQ ID NO: 2220 - DNA, 18 bp, Artificial Sequence
  Description of Artificial Sequence: Synthetic oligonucleotide
gattccagcgctgtcgtc

SEQ ID NO: 2221 - DNA, 18 bp, Artificial Sequence
  Description of Artificial Sequence: Synthetic oligonucleotide
tataggattccagcgctg

SEQ ID NO: 2222 - DNA, 18 bp, Artificial Sequence
  Description of Artificial Sequence: Synthetic oligonucleotide
cgtattataggattccag

SEQ ID NO: 2223 - DNA, 18 bp, Artificial Sequence
  Description of Artificial Sequence: Synthetic oligonucleotide
gctaccgtattataggat

SEQ ID NO: 2224 - DNA, 18 bp, Artificial Sequence
  Description of Artificial Sequence: Synthetic oligonucleotide
cctgtgctaccgtattat

SEQ ID NO: 2225 - DNA, 18 bp, Artificial Sequence
  Description of Artificial Sequence: Synthetic oligonucleotide
cagctcctgtgctaccgt

SEQ ID NO: 2226 - DNA, 18 bp, Artificial Sequence
  Description of Artificial Sequence: Synthetic oligonucleotide
aggcagctcctgtgctac

SEQ ID NO: 2227 - DNA, 18 bp, Artificial Sequence
  Description of Artificial Sequence: Synthetic oligonucleotide
gtagtaggcagctcctgt

SEQ ID NO: 2228 - DNA, 18 bp, Artificial Sequence
  Description of Artificial Sequence: Synthetic oligonucleotide
ctaatgtagtaggcagct

SEQ ID NO: 2229 - DNA, 18 bp, Artificial Sequence
  Description of Artificial Sequence: Synthetic oligonucleotide
ccccactaatgtagtagg

SEQ ID NO: 2230 - DNA, 18 bp, Artificial Sequence
  Description of Artificial Sequence: Synthetic oligonucleotide
gtctcccccactaatgta

SEQ ID NO: 2231 - DNA, 18 bp, Artificial Sequence
  Description of Artificial Sequence: Synthetic oligonucleotide
cagaagtctcccccacta

SEQ ID NO: 2232 - DNA, 18 bp, Artificial Sequence
  Description of Artificial Sequence: Synthetic oligonucleotide
tgttacagaagtctcccc

SEQ ID NO: 2233 - DNA, 18 bp, Artificial Sequence
  Description of Artificial Sequence: Synthetic oligonucleotide
cctactgttacagaagtc

SEQ ID NO: 2234 - DNA, 18 bp, Artificial Sequence
  Description of Artificial Sequence: Synthetic oligonucleotide
ccactcctactgttacag

SEQ ID NO: 2235 - DNA, 18 bp, Artificial Sequence
  Description of Artificial Sequence: Synthetic oligonucleotide
gggatccactcctactgt

SEQ ID NO: 2236 - DNA, 18 bp, Artificial Sequence
  Description of Artificial Sequence: Synthetic oligonucleotide
atcaagggatccactcct

SEQ ID NO: 2237 - DNA, 18 bp, Artificial Sequence
  Description of Artificial Sequence: Synthetic oligonucleotide
gggccatcaagggatcca

SEQ ID NO: 2238 - DNA, 18 bp, Artificial Sequence
  Description of Artificial Sequence: Synthetic oligonucleotide
ttctggggccatcaaggg

SEQ ID NO: 2239 - DNA, 18 bp, Artificial Sequence
  Description of Artificial Sequence: Synthetic oligonucleotide
tgggattctggggccatc

SEQ ID NO: 2240 - DNA, 18 bp, Artificial Sequence
  Description of Artificial Sequence: Synthetic oligonucleotide
atatatgggattctgggg

SEQ ID NO: 2241 - DNA, 18 bp, Artificial Sequence
  Description of Artificial Sequence: Synthetic oligonucleotide
agctaatatatgggattc

SEQ ID NO: 2242 - DNA, 18 bp, Artificial Sequence
  Description of Artificial Sequence: Synthetic oligonucleotide
ttagaagctaatatatgg

SEQ ID NO: 2243 - DNA, 18 bp, Artificial Sequence
  Description of Artificial Sequence: Synthetic oligonucleotide
tggtgttagaagctaata

SEQ ID NO: 2244 - DNA, 18 bp, Artificial Sequence
  Description of Artificial Sequence: Synthetic oligonucleotide
ctccatggtgttagaagc

SEQ ID NO: 2245 - DNA, 18 bp, Artificial Sequence
  Description of Artificial Sequence: Synthetic oligonucleotide
tgggtctccatggtgtta

SEQ ID NO: 2246 - DNA, 18 bp, Artificial Sequence
  Description of Artificial Sequence: Synthetic oligonucleotide
atatatgggtctccatgg

SEQ ID NO: 2247 - DNA, 18 bp, Artificial Sequence
  Description of Artificial Sequence: Synthetic oligonucleotide
tgctaatatatgggtctc

SEQ ID NO: 2248 - DNA, 18 bp, Artificial Sequence
  Description of Artificial Sequence: Synthetic oligonucleotide
ttggatgctaatatatgg

SEQ ID NO: 2249 - DNA, 18 bp, Artificial Sequence
  Description of Artificial Sequence: Synthetic oligonucleotide
tggtgttggatgctaata

SEQ ID NO: 2250 - DNA, 18 bp, Artificial Sequence
  Description of Artificial Sequence: Synthetic oligonucleotide
gtccatggtgttggatgc

SEQ ID NO: 2251 - DNA, 18 bp, Artificial Sequence
  Description of Artificial Sequence: Synthetic oligonucleotide
tgggagtccatggtgttg

SEQ ID NO: 2252 - DNA, 18 bp, Artificial Sequence
  Description of Artificial Sequence: Synthetic oligonucleotide
gcatttgggagtccatgg

SEQ ID NO: 2253 - DNA, 18 bp, Artificial Sequence
  Description of Artificial Sequence: Synthetic oligonucleotide
cgctagcatttgggagtc

SEQ ID NO: 2254 - DNA, 18 bp, Artificial Sequence
  Description of Artificial Sequence: Synthetic oligonucleotide
ttggacgctagcatttgg

SEQ ID NO: 2255 - DNA, 18 bp, Artificial Sequence
  Description of Artificial Sequence: Synthetic oligonucleotide
tggtgttggacgctagca

SEQ ID NO: 2256 - DNA, 18 bp, Artificial Sequence
  Description of Artificial Sequence: Synthetic oligonucleotide
gtccatggtgttggacgc

SEQ ID NO: 2257 - DNA, 18 bp, Artificial Sequence
  Description of Artificial Sequence: Synthetic oligonucleotide
tgggagtccatggtgttg

SEQ ID NO: 2258 - DNA, 18 bp, Artificial Sequence
  Description of Artificial Sequence: Synthetic oligonucleotide
gcatctgggagtccatgg

SEQ ID NO: 2259 - DNA, 18 bp, Artificial Sequence
  Description of Artificial Sequence: Synthetic oligonucleotide
tgctagcatctgggagtc

SEQ ID NO: 2260 - DNA, 18 bp, Artificial Sequence
  Description of Artificial Sequence: Synthetic oligonucleotide
ttggatgctagcatctgg

SEQ ID NO: 2261 - DNA, 18 bp, Artificial Sequence
  Description of Artificial Sequence: Synthetic oligonucleotide
tggtgttggatgctagca

SEQ ID NO: 2262 - DNA, 18 bp, Artificial Sequence
  Description of Artificial Sequence: Synthetic oligonucleotide
gtccatggtgttggatgc

SEQ ID NO: 2263 - DNA, 18 bp, Artificial Sequence
  Description of Artificial Sequence: Synthetic oligonucleotide
tgggagtccatggtgttg

SEQ ID NO: 2264 - DNA, 18 bp, Artificial Sequence
  Description of Artificial Sequence: Synthetic oligonucleotide
acatctgggagtccatgg

SEQ ID NO: 2265 - DNA, 18 bp, Artificial Sequence
  Description of Artificial Sequence: Synthetic oligonucleotide
cgctaacatctgggagtc

SEQ ID NO: 2266 - DNA, 18 bp, Artificial Sequence
  Description of Artificial Sequence: Synthetic oligonucleotide
ctagacgctaacatctgg

SEQ ID NO: 2267 - DNA, 18 bp, Artificial Sequence
  Description of Artificial Sequence: Synthetic oligonucleotide
tggtgctagacgctaaca

SEQ ID NO: 2268 - DNA, 18 bp, Artificial Sequence
  Description of Artificial Sequence: Synthetic oligonucleotide
gtccatggtgctagacgc

SEQ ID NO: 2269 - DNA, 18 bp, Artificial Sequence
  Description of Artificial Sequence: Synthetic oligonucleotide
tgggagtccatggtgcta

SEQ ID NO: 2270 - DNA, 18 bp, Artificial Sequence
  Description of Artificial Sequence: Synthetic oligonucleotide
acatctgggagtccatgg

SEQ ID NO: 2271 - DNA, 18 bp, Artificial Sequence
  Description of Artificial Sequence: Synthetic oligonucleotide
tgctaacatctgggagtc

SEQ ID NO: 2272 - DNA, 18 bp, Artificial Sequence
  Description of Artificial Sequence: Synthetic oligonucleotide
ctagttgctaacatctgg

SEQ ID NO: 2273 - DNA, 18 bp, Artificial Sequence
  Description of Artificial Sequence: Synthetic oligonucleotide
tggagctagttgctaaca

SEQ ID NO: 2274 - DNA, 18 bp, Artificial Sequence
  Description of Artificial Sequence: Synthetic oligonucleotide
gtccatggagctagttgc

SEQ ID NO: 2275 - DNA, 18 bp, Artificial Sequence
  Description of Artificial Sequence: Synthetic oligonucleotide
tgggagtccatggagcta

SEQ ID NO: 2276 - DNA, 18 bp, Artificial Sequence
  Description of Artificial Sequence: Synthetic oligonucleotide
acatctgggagtccatgg

SEQ ID NO: 2277 - DNA, 18 bp, Artificial Sequence
  Description of Artificial Sequence: Synthetic oligonucleotide
tgctaacatctgggagtc

SEQ ID NO: 2278 - DNA, 18 bp, Artificial Sequence
  Description of Artificial Sequence: Synthetic oligonucleotide
ctagttgctaacatctgg

SEQ ID NO: 2279 - DNA, 18 bp, Artificial Sequence
  Description of Artificial Sequence: Synthetic oligonucleotide
tggagctagttgctaaca

SEQ ID NO: 2280 - DNA, 18 bp, Artificial Sequence
  Description of Artificial Sequence: Synthetic oligonucleotide
gtccatggagctagttgc

SEQ ID NO: 2281 - DNA, 18 bp, Artificial Sequence
  Description of Artificial Sequence: Synthetic oligonucleotide
tgggagtccatggagcta

SEQ ID NO: 2282 - DNA, 18 bp, Artificial Sequence
  Description of Artificial Sequence: Synthetic oligonucleotide
acatctgggagtccatgg

SEQ ID NO: 2283 - DNA, 18 bp, Artificial Sequence
  Description of Artificial Sequence: Synthetic oligonucleotide
tgctaacatctgggagtc

SEQ ID NO: 2284 - DNA, 18 bp, Artificial Sequence
  Description of Artificial Sequence: Synthetic oligonucleotide
ctagttgctaacatctgg

SEQ ID NO: 2285 - DNA, 18 bp, Artificial Sequence
  Description of Artificial Sequence: Synthetic oligonucleotide
tagtgctagttgctaaca

SEQ ID NO: 2286 - DNA, 18 bp, Artificial Sequence
  Description of Artificial Sequence: Synthetic oligonucleotide
gtccatagtgctagttgc

SEQ ID NO: 2287 - DNA, 18 bp, Artificial Sequence
  Description of Artificial Sequence: Synthetic oligonucleotide
tgggagtccatagtgcta

SEQ ID NO: 2288 - DNA, 18 bp, Artificial Sequence
  Description of Artificial Sequence: Synthetic oligonucleotide
acatctgggagtccatag

SEQ ID NO: 2289 - DNA, 18 bp, Artificial Sequence
  Description of Artificial Sequence: Synthetic oligonucleotide
tgctaacatctgggagtc

SEQ ID NO: 2290 - DNA, 18 bp, Artificial Sequence
  Description of Artificial Sequence: Synthetic oligonucleotide
ctggttgctaacatctgg

SEQ ID NO: 2291 - DNA, 18 bp, Artificial Sequence
  Description of Artificial Sequence: Synthetic oligonucleotide
tggaactggttgctaaca

SEQ ID NO: 2292 - DNA, 18 bp, Artificial Sequence
  Description of Artificial Sequence: Synthetic oligonucleotide
gtccatggaactggttgc

SEQ ID NO: 2293 - DNA, 18 bp, Artificial Sequence
  Description of Artificial Sequence: Synthetic oligonucleotide
tgggagtccatggaactg

SEQ ID NO: 2294 - DNA, 18 bp, Artificial Sequence
  Description of Artificial Sequence: Synthetic oligonucleotide
acatctgggagtccatgg

SEQ ID NO: 2295 - DNA, 18 bp, Artificial Sequence
  Description of Artificial Sequence: Synthetic oligonucleotide
tgctaacatctgggagtc

SEQ ID NO: 2296 - DNA, 18 bp, Artificial Sequence
  Description of Artificial Sequence: Synthetic oligonucleotide
ctggttgctaacatctgg

SEQ ID NO: 2297 - DNA, 18 bp, Artificial Sequence
  Description of Artificial Sequence: Synthetic oligonucleotide
tggagctggttgctaaca

SEQ ID NO: 2298 - DNA, 18 bp, Artificial Sequence
  Description of Artificial Sequence: Synthetic oligonucleotide
gtccatggagctggttgc

SEQ ID NO: 2299 - DNA, 18 bp, Artificial Sequence
  Description of Artificial Sequence: Synthetic oligonucleotide
tgggagtccatggagctg

SEQ ID NO: 2300 - DNA, 18 bp, Artificial Sequence
  Description of Artificial Sequence: Synthetic oligonucleotide
acatctgggagtccatgg

SEQ ID NO: 2301 - DNA, 18 bp, Artificial Sequence
  Description of Artificial Sequence: Synthetic oligonucleotide
tgctaacatctgggagtc

SEQ ID NO: 2302 - DNA, 18 bp, Artificial Sequence
  Description of Artificial Sequence: Synthetic oligonucleotide
ctggttgctaacatctgg

SEQ ID NO: 2303 - DNA, 18 bp, Artificial Sequence
  Description of Artificial Sequence: Synthetic oligonucleotide
tggagctggttgctaaca

SEQ ID NO: 2304 - DNA, 18 bp, Artificial Sequence
  Description of Artificial Sequence: Synthetic oligonucleotide
gtccatggagctggttgc

SEQ ID NO: 2305 - DNA, 18 bp, Artificial Sequence
  Description of Artificial Sequence: Synthetic oligonucleotide
tgggagtccatggagctg

SEQ ID NO: 2306 - DNA, 18 bp, Artificial Sequence
  Description of Artificial Sequence: Synthetic oligonucleotide
acatctgggagtccatgg

SEQ ID NO: 2307 - DNA, 18 bp, Artificial Sequence
  Description of Artificial Sequence: Synthetic oligonucleotide
tgctaacatctgggagtc

SEQ ID NO: 2308 - DNA, 18 bp, Artificial Sequence
  Description of Artificial Sequence: Synthetic oligonucleotide
ctggttgctaacatctgg

SEQ ID NO: 2309 - DNA, 18 bp, Artificial Sequence
  Description of Artificial Sequence: Synthetic oligonucleotide
tggagctggttgctaaca

SEQ ID NO: 2310 - DNA, 18 bp, Artificial Sequence
  Description of Artificial Sequence: Synthetic oligonucleotide
gtccatggagctggttgc

SEQ ID NO: 2311 - DNA, 18 bp, Artificial Sequence
  Description of Artificial Sequence: Synthetic oligonucleotide
tgggagtccatggagctg

SEQ ID NO: 2312 - DNA, 18 bp, Artificial Sequence
  Description of Artificial Sequence: Synthetic oligonucleotide
acatctgggagtccatgg

SEQ ID NO: 2313 - DNA, 18 bp, Artificial Sequence
  Description of Artificial Sequence: Synthetic oligonucleotide
tgctaacatctgggagtc

SEQ ID NO: 2314 - DNA, 18 bp, Artificial Sequence
  Description of Artificial Sequence: Synthetic oligonucleotide
ctggttgctaacatctgg

SEQ ID NO: 2315 - DNA, 18 bp, Artificial Sequence
  Description of Artificial Sequence: Synthetic oligonucleotide
tggtgctggttgctaaca

SEQ ID NO: 2316 - DNA, 18 bp, Artificial Sequence
  Description of Artificial Sequence: Synthetic oligonucleotide
atccatggtgctggttgc

SEQ ID NO: 2317 - DNA, 18 bp, Artificial Sequence
  Description of Artificial Sequence: Synthetic oligonucleotide
tgagaatccatggtgctg

SEQ ID NO: 2318 - DNA, 18 bp, Artificial Sequence
  Description of Artificial Sequence: Synthetic oligonucleotide
acatctgagaatccatgg

SEQ ID NO: 2319 - DNA, 18 bp, Artificial Sequence
  Description of Artificial Sequence: Synthetic oligonucleotide
tgctaacatctgagaatc

SEQ ID NO: 2320 - DNA, 18 bp, Artificial Sequence
  Description of Artificial Sequence: Synthetic oligonucleotide
ctggttgctaacatctga

SEQ ID NO: 2321 - DNA, 18 bp, Artificial Sequence
  Description of Artificial Sequence: Synthetic oligonucleotide
tggtgctggttgctaaca

SEQ ID NO: 2322 - DNA, 18 bp, Artificial Sequence
  Description of Artificial Sequence: Synthetic oligonucleotide
gtccatggtgctggttgc

SEQ ID NO: 2323 - DNA, 18 bp, Artificial Sequence
  Description of Artificial Sequence: Synthetic oligonucleotide
tgggagtccatggtgctg

SEQ ID NO: 2324 - DNA, 18 bp, Artificial Sequence
  Description of Artificial Sequence: Synthetic oligonucleotide
acatctgggagtccatgg

SEQ ID NO: 2325 - DNA, 18 bp, Artificial Sequence
  Description of Artificial Sequence: Synthetic oligonucleotide
tgctaacatctgggagtc

SEQ ID NO: 2326 - DNA, 18 bp, Artificial Sequence
  Description of Artificial Sequence: Synthetic oligonucleotide
ctagttgctaacatctgg

SEQ ID NO: 2327 - DNA, 18 bp, Artificial Sequence
  Description of Artificial Sequence: Synthetic oligonucleotide
ttgagctagttgctaaca

SEQ ID NO: 2328 - DNA, 18 bp, Artificial Sequence
  Description of Artificial Sequence: Synthetic oligonucleotide
atccattgagctagttgc

SEQ ID NO: 2329 - DNA, 18 bp, Artificial Sequence
  Description of Artificial Sequence: Synthetic oligonucleotide
tgggaatccattgagcta

SEQ ID NO: 2330 - DNA, 18 bp, Artificial Sequence
  Description of Artificial Sequence: Synthetic oligonucleotide
acatctgggaatccattg

SEQ ID NO: 2331 - DNA, 18 bp, Artificial Sequence
  Description of Artificial Sequence: Synthetic oligonucleotide
tgctaacatctgggaatc

SEQ ID NO: 2332 - DNA, 18 bp, Artificial Sequence
  Description of Artificial Sequence: Synthetic oligonucleotide
ccagatgctaacatctgg

SEQ ID NO: 2333 - DNA, 18 bp, Artificial Sequence
  Description of Artificial Sequence: Synthetic oligonucleotide
tagtgccagatgctaaca

SEQ ID NO: 2334 - DNA, 18 bp, Artificial Sequence
  Description of Artificial Sequence: Synthetic oligonucleotide
gtccatagtgccagatgc

SEQ ID NO: 2335 - DNA, 18 bp, Artificial Sequence
  Description of Artificial Sequence: Synthetic oligonucleotide
tgagagtccatagtgcca

SEQ ID NO: 2336 - DNA, 18 bp, Artificial Sequence
  Description of Artificial Sequence: Synthetic oligonucleotide
acatttgagagtccatag

SEQ ID NO: 2337 - DNA, 18 bp, Artificial Sequence
  Description of Artificial Sequence: Synthetic oligonucleotide
agctaacatttgagagtc

SEQ ID NO: 2338 - DNA, 18 bp, Artificial Sequence
  Description of Artificial Sequence: Synthetic oligonucleotide
ccagaagctaacatttga

SEQ ID NO: 2339 - DNA, 18 bp, Artificial Sequence
  Description of Artificial Sequence: Synthetic oligonucleotide
tggtgccagaagctaaca

SEQ ID NO: 2340 - DNA, 18 bp, Artificial Sequence
  Description of Artificial Sequence: Synthetic oligonucleotide
atccatggtgccagaagc

SEQ ID NO: 2341 - DNA, 18 bp, Artificial Sequence
  Description of Artificial Sequence: Synthetic oligonucleotide
tgagcatccatggtgcca

SEQ ID NO: 2342 - DNA, 18 bp, Artificial Sequence
  Description of Artificial Sequence: Synthetic oligonucleotide
acatctgagcatccatgg

SEQ ID NO: 2343 - DNA, 18 bp, Artificial Sequence
  Description of Artificial Sequence: Synthetic oligonucleotide
cgctaacatctgagcatc

SEQ ID NO: 2344 - DNA, 18 bp, Artificial Sequence
  Description of Artificial Sequence: Synthetic oligonucleotide
ccagacgctaacatctga

SEQ ID NO: 2345 - DNA, 18 bp, Artificial Sequence
  Description of Artificial Sequence: Synthetic oligonucleotide
tggtaccagacgctaaca

SEQ ID NO: 2346 - DNA, 18 bp, Artificial Sequence
  Description of Artificial Sequence: Synthetic oligonucleotide
atccatggtaccagacgc

SEQ ID NO: 2347 - DNA, 18 bp, Artificial Sequence
  Description of Artificial Sequence: Synthetic oligonucleotide
tgggcatccatggtacca

SEQ ID NO: 2348 - DNA, 18 bp, Artificial Sequence
  Description of Artificial Sequence: Synthetic oligonucleotide
acatctgggcatccatgg

SEQ ID NO: 2349 - DNA, 18 bp, Artificial Sequence
  Description of Artificial Sequence: Synthetic oligonucleotide
cgctaacatctgggcatc

SEQ ID NO: 2350 - DNA, 18 bp, Artificial Sequence
  Description of Artificial Sequence: Synthetic oligonucleotide
ctagacgctaacatctgg

SEQ ID NO: 2351 - DNA, 18 bp, Artificial Sequence
  Description of Artificial Sequence: Synthetic oligonucleotide
gggtactagacgctaaca

SEQ ID NO: 2352 - DNA, 18 bp, Artificial Sequence
  Description of Artificial Sequence: Synthetic oligonucleotide
atcttgggtactagacgc

SEQ ID NO: 2353 - DNA, 18 bp, Artificial Sequence
  Description of Artificial Sequence: Synthetic oligonucleotide
gcagaatcttgggtacta

SEQ ID NO: 2354 - DNA, 18 bp, Artificial Sequence
  Description of Artificial Sequence: Synthetic oligonucleotide
acatagcagaatcttggg

SEQ ID NO: 2355 - DNA, 18 bp, Artificial Sequence
  Description of Artificial Sequence: Synthetic oligonucleotide
acccaacatagcagaatc

SEQ ID NO: 2356 - DNA, 18 bp, Artificial Sequence
  Description of Artificial Sequence: Synthetic oligonucleotide
tttgaacccaacatagca

SEQ ID NO: 2357 - DNA, 18 bp, Artificial Sequence
  Description of Artificial Sequence: Synthetic oligonucleotide
gagattttgaacccaaca

SEQ ID NO: 2358 - DNA, 18 bp, Artificial Sequence
  Description of Artificial Sequence: Synthetic oligonucleotide
atcaggagattttgaacc

SEQ ID NO: 2359 - DNA, 18 bp, Artificial Sequence
  Description of Artificial Sequence: Synthetic oligonucleotide
tagggatcaggagatttt

SEQ ID NO: 2360 - DNA, 18 bp, Artificial Sequence
  Description of Artificial Sequence: Synthetic oligonucleotide
acctatagggatcaggag

SEQ ID NO: 2361 - DNA, 18 bp, Artificial Sequence
  Description of Artificial Sequence: Synthetic oligonucleotide
agctaacctatagggatc

SEQ ID NO: 2362 - DNA, 18 bp, Artificial Sequence
  Description of Artificial Sequence: Synthetic oligonucleotide
tcctgagctaacctatag

SEQ ID NO: 2363 - DNA, 18 bp, Artificial Sequence
  Description of Artificial Sequence: Synthetic oligonucleotide
aaggatcctgagctaacc

SEQ ID NO: 2364 - DNA, 18 bp, Artificial Sequence
  Description of Artificial Sequence: Synthetic oligonucleotide
cctgtaaggatcctgagc

SEQ ID NO: 2365 - DNA, 18 bp, Artificial Sequence
  Description of Artificial Sequence: Synthetic oligonucleotide
gctaacctgtaaggatcc

SEQ ID NO: 2366 - DNA, 18 bp, Artificial Sequence
  Description of Artificial Sequence: Synthetic oligonucleotide
cctgagctaacctgtaag

SEQ ID NO: 2367 - DNA, 18 bp, Artificial Sequence
  Description of Artificial Sequence: Synthetic oligonucleotide
gggatcctgagctaacct

SEQ ID NO: 2368 - DNA, 18 bp, Artificial Sequence
  Description of Artificial Sequence: Synthetic oligonucleotide
ctatagggatcctgagct

SEQ ID NO: 2369 - DNA, 18 bp, Artificial Sequence
  Description of Artificial Sequence: Synthetic oligonucleotide
ccaacctatagggatcct

SEQ ID NO: 2370 - DNA, 18 bp, Artificial Sequence
  Description of Artificial Sequence: Synthetic oligonucleotide
atggcccaacctataggg

SEQ ID NO: 2371 - DNA, 18 bp, Artificial Sequence
  Description of Artificial Sequence: Synthetic oligonucleotide
gggtcatggcccaaccta

SEQ ID NO: 2372 - DNA, 18 bp, Artificial Sequence
  Description of Artificial Sequence: Synthetic oligonucleotide
tataggggtcatggccca

SEQ ID NO: 2373 - DNA, 18 bp, Artificial Sequence
  Description of Artificial Sequence: Synthetic oligonucleotide
taatctataggggtcatg

SEQ ID NO: 2374 - DNA, 18 bp, Artificial Sequence
  Description of Artificial Sequence: Synthetic oligonucleotide
tgacctaatctatagggg

SEQ ID NO: 2375 - DNA, 18 bp, Artificial Sequence
  Description of Artificial Sequence: Synthetic oligonucleotide
catcatgacctaatctat

SEQ ID NO: 2376 - DNA, 18 bp, Artificial Sequence
  Description of Artificial Sequence: Synthetic oligonucleotide
gtaagcatcatgacctaa

SEQ ID NO: 2377 - DNA, 18 bp, Artificial Sequence
  Description of Artificial Sequence: Synthetic oligonucleotide
aacctgtaagcatcatga

SEQ ID NO: 2378 - DNA, 18 bp, Artificial Sequence
  Description of Artificial Sequence: Synthetic oligonucleotide
gtcctaacctgtaagcat

SEQ ID NO: 2379 - DNA, 18 bp, Artificial Sequence
  Description of Artificial Sequence: Synthetic oligonucleotide
gtcttgtcctaacctgta

SEQ ID NO: 2380 - DNA, 18 bp, Artificial Sequence
  Description of Artificial Sequence: Synthetic oligonucleotide
taagggtcttgtcctaac

SEQ ID NO: 2381 - DNA, 18 bp, Artificial Sequence
  Description of Artificial Sequence: Synthetic oligonucleotide
atctataagggtcttgtc

SEQ ID NO: 2382 - DNA, 18 bp, Artificial Sequence
  Description of Artificial Sequence: Synthetic oligonucleotide
gcctaatctataagggtc

SEQ ID NO: 2383 - DNA, 18 bp, Artificial Sequence
  Description of Artificial Sequence: Synthetic oligonucleotide
tcatggcctaatctataa

SEQ ID NO: 2384 - DNA, 18 bp, Artificial Sequence
  Description of Artificial Sequence: Synthetic oligonucleotide
agggatcatggcctaatc

SEQ ID NO: 2385 - DNA, 18 bp, Artificial Sequence
  Description of Artificial Sequence: Synthetic oligonucleotide
tctgtagggatcatggcc

SEQ ID NO: 2386 - DNA, 18 bp, Artificial Sequence
  Description of Artificial Sequence: Synthetic oligonucleotide
gttagtctgtagggatca

SEQ ID NO: 2387 - DNA, 18 bp, Artificial Sequence
  Description of Artificial Sequence: Synthetic oligonucleotide
caggagttagtctgtagg

SEQ ID NO: 2388 - DNA, 18 bp, Artificial Sequence
  Description of Artificial Sequence: Synthetic oligonucleotide
gggatcaggagttagtct

SEQ ID NO: 2389 - DNA, 18 bp, Artificial Sequence
  Description of Artificial Sequence: Synthetic oligonucleotide
ctatagggatcaggagtt

SEQ ID NO: 2390 - DNA, 18 bp, Artificial Sequence
  Description of Artificial Sequence: Synthetic oligonucleotide
acatcctatagggatcag

SEQ ID NO: 2391 - DNA, 18 bp, Artificial Sequence
  Description of Artificial Sequence: Synthetic oligonucleotide
aggtgacatcctataggg

SEQ ID NO: 2392 - DNA, 18 bp, Artificial Sequence
  Description of Artificial Sequence: Synthetic oligonucleotide
ggtctaggtgacatccta

SEQ ID NO: 2393 - DNA, 18 bp, Artificial Sequence
  Description of Artificial Sequence: Synthetic oligonucleotide
tgtagggtctaggtgaca

SEQ ID NO: 2394 - DNA, 18 bp, Artificial Sequence
  Description of Artificial Sequence: Synthetic oligonucleotide
tatcctgtagggtctagg

SEQ ID NO: 2395 - DNA, 18 bp, Artificial Sequence
  Description of Artificial Sequence: Synthetic oligonucleotide
ggtgctatcctgtagggt

SEQ ID NO: 2396 - DNA, 18 bp, Artificial Sequence
  Description of Artificial Sequence: Synthetic oligonucleotide
acctgggtgctatcctgt

SEQ ID NO: 2397 - DNA, 18 bp, Artificial Sequence
  Description of Artificial Sequence: Synthetic oligonucleotide
ataggacctgggtgctat

SEQ ID NO: 2398 - DNA, 18 bp, Artificial Sequence
  Description of Artificial Sequence: Synthetic oligonucleotide
attctataggacctgggt

SEQ ID NO: 2399 - DNA, 18 bp, Artificial Sequence
  Description of Artificial Sequence: Synthetic oligonucleotide
gtgctattctataggacc

SEQ ID NO: 2400 - DNA, 18 bp, Artificial Sequence
  Description of Artificial Sequence: Synthetic oligonucleotide
cctgggtgctattctata

SEQ ID NO: 2401 - DNA, 18 bp, Artificial Sequence
  Description of Artificial Sequence: Synthetic oligonucleotide
tatggcctgggtgctatt

SEQ ID NO: 2402 - DNA, 18 bp, Artificial Sequence
  Description of Artificial Sequence: Synthetic oligonucleotide
acctatatggcctgggtg

SEQ ID NO: 2403 - DNA, 18 bp, Artificial Sequence
  Description of Artificial Sequence: Synthetic oligonucleotide
tgctaacctatatggcct

SEQ ID NO: 2404 - DNA, 18 bp, Artificial Sequence
  Description of Artificial Sequence: Synthetic oligonucleotide
ctaggtgctaacctatat

SEQ ID NO: 2405 - DNA, 18 bp, Artificial Sequence
  Description of Artificial Sequence: Synthetic oligonucleotide
ggggtctaggtgctaacc

SEQ ID NO: 2406 - DNA, 18 bp, Artificial Sequence
  Description of Artificial Sequence: Synthetic oligonucleotide
catcaggggtctaggtgc

SEQ ID NO: 2407 - DNA, 18 bp, Artificial Sequence
  Description of Artificial Sequence: Synthetic oligonucleotide
gctaacatcaggggtcta

SEQ ID NO: 2408 - DNA, 18 bp, Artificial Sequence
  Description of Artificial Sequence: Synthetic oligonucleotide
tagatgctaacatcaggg

SEQ ID NO: 2409 - DNA, 18 bp, Artificial Sequence
  Description of Artificial Sequence: Synthetic oligonucleotide
acgtctagatgctaacat

SEQ ID NO: 2410 - DNA, 18 bp, Artificial Sequence
  Description of Artificial Sequence: Synthetic oligonucleotide
atagaacgtctagatgct

SEQ ID NO: 2411 - DNA, 18 bp, Artificial Sequence
  Description of Artificial Sequence: Synthetic oligonucleotide
tcatcatagaacgtctag

SEQ ID NO: 2412 - DNA, 18 bp, Artificial Sequence
  Description of Artificial Sequence: Synthetic oligonucleotide
ggacatcatcatagaacg

SEQ ID NO: 2413 - DNA, 18 bp, Artificial Sequence
  Description of Artificial Sequence: Synthetic oligonucleotide
gcataggacatcatcata

SEQ ID NO: 2414 - DNA, 18 bp, Artificial Sequence
  Description of Artificial Sequence: Synthetic oligonucleotide
ctgcagcataggacatca

SEQ ID NO: 2415 - DNA, 18 bp, Artificial Sequence
  Description of Artificial Sequence: Synthetic oligonucleotide
gttctgcagcataggaca

SEQ ID NO: 2416 - DNA, 18 bp, Artificial Sequence
  Description of Artificial Sequence: Synthetic oligonucleotide
ggaacgttctgcagcata

SEQ ID NO: 2417 - DNA, 18 bp, Artificial Sequence
  Description of Artificial Sequence: Synthetic oligonucleotide
atcatggaacgttctgca

SEQ ID NO: 2418 - DNA, 18 bp, Artificial Sequence
  Description of Artificial Sequence: Synthetic oligonucleotide
atgacatcatggaacgtt

SEQ ID NO: 2419 - DNA, 18 bp, Artificial Sequence
  Description of Artificial Sequence: Synthetic oligonucleotide
gtaagatgacatcatgga

SEQ ID NO: 2420 - DNA, 18 bp, Artificial Sequence
  Description of Artificial Sequence: Synthetic oligonucleotide
cgttcgtaagatgacatc

SEQ ID NO: 2421 - DNA, 18 bp, Artificial Sequence
  Description of Artificial Sequence: Synthetic oligonucleotide
tagagcgttcgtaagatg

SEQ ID NO: 2422 - DNA, 18 bp, Artificial Sequence
  Description of Artificial Sequence: Synthetic oligonucleotide
catcatagagcgttcgta

SEQ ID NO: 2423 - DNA, 18 bp, Artificial Sequence
  Description of Artificial Sequence: Synthetic oligonucleotide
taagacatcatagagcgt

SEQ ID NO: 2424 - DNA, 18 bp, Artificial Sequence
  Description of Artificial Sequence: Synthetic oligonucleotide
gctcataagacatcatag

SEQ ID NO: 2425 - DNA, 18 bp, Artificial Sequence
  Description of Artificial Sequence: Synthetic oligonucleotide
agaccgctcataagacat

SEQ ID NO: 2426 - DNA, 18 bp, Artificial Sequence
  Description of Artificial Sequence: Synthetic oligonucleotide
atcatagaccgctcataa

SEQ ID NO: 2427 - DNA, 18 bp, Artificial Sequence
  Description of Artificial Sequence: Synthetic oligonucleotide
gggacatcatagaccgct

SEQ ID NO: 2428 - DNA, 18 bp, Artificial Sequence
  Description of Artificial Sequence: Synthetic oligonucleotide
cataggggacatcataga

SEQ ID NO: 2429 - DNA, 18 bp, Artificial Sequence
  Description of Artificial Sequence: Synthetic oligonucleotide
tcagccataggggacatc

SEQ ID NO: 2430 - DNA, 18 bp, Artificial Sequence
  Description of Artificial Sequence: Synthetic oligonucleotide
agcgttcagccatagggg

SEQ ID NO: 2431 - DNA, 18 bp, Artificial Sequence
  Description of Artificial Sequence: Synthetic oligonucleotide
catagagcgttcagccat

SEQ ID NO: 2432 - DNA, 18 bp, Artificial Sequence
  Description of Artificial Sequence: Synthetic oligonucleotide
gacatcatagagcgttca

SEQ ID NO: 2433 - DNA, 18 bp, Artificial Sequence
  Description of Artificial Sequence: Synthetic oligonucleotide
aggctgacatcatagagc

SEQ ID NO: 2434 - DNA, 18 bp, Artificial Sequence
  Description of Artificial Sequence: Synthetic oligonucleotide
ctcgtaggctgacatcat

SEQ ID NO: 2435 - DNA, 18 bp, Artificial Sequence
  Description of Artificial Sequence: Synthetic oligonucleotide
gagcgctcgtaggctgac

SEQ ID NO: 2436 - DNA, 18 bp, Artificial Sequence
  Description of Artificial Sequence: Synthetic oligonucleotide
tcatagagcgctcgtagg

SEQ ID NO: 2437 - DNA, 18 bp, Artificial Sequence
  Description of Artificial Sequence: Synthetic oligonucleotide
tgacatcatagagcgctc

SEQ ID NO: 2438 - DNA, 18 bp, Artificial Sequence
  Description of Artificial Sequence: Synthetic oligonucleotide
taggctgacatcatagag

SEQ ID NO: 2439 - DNA, 18 bp, Artificial Sequence
  Description of Artificial Sequence: Synthetic oligonucleotide
gctcgtaggctgacatca

SEQ ID NO: 2440 - DNA, 18 bp, Artificial Sequence
  Description of Artificial Sequence: Synthetic oligonucleotide
agagcgctcgtaggctga

SEQ ID NO: 2441 - DNA, 18 bp, Artificial Sequence
  Description of Artificial Sequence: Synthetic oligonucleotide
atcatagagcgctcgtag

SEQ ID NO: 2442 - DNA, 18 bp, Artificial Sequence
  Description of Artificial Sequence: Synthetic oligonucleotide
gggacatcatagagcgct

SEQ ID NO: 2443 - DNA, 18 bp, Artificial Sequence
  Description of Artificial Sequence: Synthetic oligonucleotide
cataggggacatcataga

SEQ ID NO: 2444 - DNA, 18 bp, Artificial Sequence
  Description of Artificial Sequence: Synthetic oligonucleotide
tcagccataggggacatc

SEQ ID NO: 2445 - DNA, 18 bp, Artificial Sequence
  Description of Artificial Sequence: Synthetic oligonucleotide
agcgctcagccatagggg

SEQ ID NO: 2446 - DNA, 18 bp, Artificial Sequence
  Description of Artificial Sequence: Synthetic oligonucleotide
catagagcgctcagccat

SEQ ID NO: 2447 - DNA, 18 bp, Artificial Sequence
  Description of Artificial Sequence: Synthetic oligonucleotide
gacatcatagagcgctca

SEQ ID NO: 2448 - DNA, 18 bp, Artificial Sequence
  Description of Artificial Sequence: Synthetic oligonucleotide
aagctgacatcatagagc

SEQ ID NO: 2449 - DNA, 18 bp, Artificial Sequence
  Description of Artificial Sequence: Synthetic oligonucleotide
ttcataagctgacatcat

SEQ ID NO: 2450 - DNA, 18 bp, Artificial Sequence
  Description of Artificial Sequence: Synthetic oligonucleotide
gagcgttcataagctgac

SEQ ID NO: 2451 - DNA, 18 bp, Artificial Sequence
  Description of Artificial Sequence: Synthetic oligonucleotide
tcatggagcgttcataag

SEQ ID NO: 2452 - DNA, 18 bp, Artificial Sequence
  Description of Artificial Sequence: Synthetic oligonucleotide
tgacatcatggagcgttc

SEQ ID NO: 2453 - DNA, 18 bp, Artificial Sequence
  Description of Artificial Sequence: Synthetic oligonucleotide
taagctgacatcatggag

SEQ ID NO: 2454 - DNA, 18 bp, Artificial Sequence
  Description of Artificial Sequence: Synthetic oligonucleotide
gttcataagctgacatca

SEQ ID NO: 2455 - DNA, 18 bp, Artificial Sequence
  Description of Artificial Sequence: Synthetic oligonucleotide
ggagcgttcataagctga

SEQ ID NO: 2456 - DNA, 18 bp, Artificial Sequence
  Description of Artificial Sequence: Synthetic oligonucleotide
atcatggagcgttcataa

SEQ ID NO: 2457 - DNA, 18 bp, Artificial Sequence
  Description of Artificial Sequence: Synthetic oligonucleotide
gggacatcatggagcgtt

SEQ ID NO: 2458 - DNA, 18 bp, Artificial Sequence
  Description of Artificial Sequence: Synthetic oligonucleotide
cattggggacatcatgga

SEQ ID NO: 2459 - DNA, 18 bp, Artificial Sequence
  Description of Artificial Sequence: Synthetic oligonucleotide
tcagccattggggacatc

SEQ ID NO: 2460 - DNA, 18 bp, Artificial Sequence
  Description of Artificial Sequence: Synthetic oligonucleotide
atcgatcagccattgggg

SEQ ID NO: 2461 - DNA, 18 bp, Artificial Sequence
  Description of Artificial Sequence: Synthetic oligonucleotide
catagatcgatcagccat

SEQ ID NO: 2462 - DNA, 18 bp, Artificial Sequence
  Description of Artificial Sequence: Synthetic oligonucleotide
gacatcatagatcgatca

SEQ ID NO: 2463 - DNA, 18 bp, Artificial Sequence
  Description of Artificial Sequence: Synthetic oligonucleotide
ccatggacatcatagatc

SEQ ID NO: 2464 - DNA, 18 bp, Artificial Sequence
  Description of Artificial Sequence: Synthetic oligonucleotide
agcacccatggacatcat

SEQ ID NO: 2465 - DNA, 18 bp, Artificial Sequence
  Description of Artificial Sequence: Synthetic oligonucleotide
cggtcagcacccatggac

SEQ ID NO: 2466 - DNA, 18 bp, Artificial Sequence
  Description of Artificial Sequence: Synthetic oligonucleotide
tagaccggtcagcaccca

SEQ ID NO: 2467 - DNA, 18 bp, Artificial Sequence
  Description of Artificial Sequence: Synthetic oligonucleotide
catcatagaccggtcagc

SEQ ID NO: 2468 - DNA, 18 bp, Artificial Sequence
  Description of Artificial Sequence: Synthetic oligonucleotide
gacgacatcatagaccgg

SEQ ID NO: 2469 - DNA, 18 bp, Artificial Sequence
  Description of Artificial Sequence: Synthetic oligonucleotide
agtatgacgacatcatag

SEQ ID NO: 2470 - DNA, 18 bp, Artificial Sequence
  Description of Artificial Sequence: Synthetic oligonucleotide
agcagagtatgacgacat

SEQ ID NO: 2471 - DNA, 18 bp, Artificial Sequence
  Description of Artificial Sequence: Synthetic oligonucleotide
tcagcagcagagtatgac

SEQ ID NO: 2472 - DNA, 18 bp, Artificial Sequence
  Description of Artificial Sequence: Synthetic oligonucleotide
accggtcagcagcagagt

SEQ ID NO: 2473 - DNA, 18 bp, Artificial Sequence
  Description of Artificial Sequence: Synthetic oligonucleotide
catagaccggtcagcagc

SEQ ID NO: 2474 - DNA, 18 bp, Artificial Sequence
  Description of Artificial Sequence: Synthetic oligonucleotide
gacatcatagaccggtca

SEQ ID NO: 2475 - DNA, 18 bp, Artificial Sequence
  Description of Artificial Sequence: Synthetic oligonucleotide
acgatgacatcatagacc

SEQ ID NO: 2476 - DNA, 18 bp, Artificial Sequence
  Description of Artificial Sequence: Synthetic oligonucleotide
agagtacgatgacatcat

SEQ ID NO: 2477 - DNA, 18 bp, Artificial Sequence
  Description of Artificial Sequence: Synthetic oligonucleotide
gctgcagagtacgatgac

SEQ ID NO: 2478 - DNA, 18 bp, Artificial Sequence
  Description of Artificial Sequence: Synthetic oligonucleotide
ggtcagctgcagagtacg

SEQ ID NO: 2479 - DNA, 18 bp, Artificial Sequence
  Description of Artificial Sequence: Synthetic oligonucleotide
agatcggtcagctgcaga

SEQ ID NO: 2480 - DNA, 18 bp, Artificial Sequence
  Description of Artificial Sequence: Synthetic oligonucleotide
atcatagatcggtcagct

SEQ ID NO: 2481 - DNA, 18 bp, Artificial Sequence
  Description of Artificial Sequence: Synthetic oligonucleotide
atgacatcatagatcggt

SEQ ID NO: 2482 - DNA, 18 bp, Artificial Sequence
  Description of Artificial Sequence: Synthetic oligonucleotide
ataagatgacatcataga

SEQ ID NO: 2483 - DNA, 18 bp, Artificial Sequence
  Description of Artificial Sequence: Synthetic oligonucleotide
gcagtataagatgacatc

SEQ ID NO: 2484 - DNA, 18 bp, Artificial Sequence
  Description of Artificial Sequence: Synthetic oligonucleotide
gatcagcagtataagatg

SEQ ID NO: 2485 - DNA, 18 bp, Artificial Sequence
  Description of Artificial Sequence: Synthetic oligonucleotide
tgaacgatcagcagtata

SEQ ID NO: 2486 - DNA, 18 bp, Artificial Sequence
  Description of Artificial Sequence: Synthetic oligonucleotide
atcattgaacgatcagca

SEQ ID NO: 2487 - DNA, 18 bp, Artificial Sequence
  Description of Artificial Sequence: Synthetic oligonucleotide
tagacatcattgaacgat

SEQ ID NO: 2488 - DNA, 18 bp, Artificial Sequence
  Description of Artificial Sequence: Synthetic oligonucleotide
agccatagacatcattga

SEQ ID NO: 2489 - DNA, 18 bp, Artificial Sequence
  Description of Artificial Sequence: Synthetic oligonucleotide
tcagcagccatagacatc

SEQ ID NO: 2490 - DNA, 18 bp, Artificial Sequence
  Description of Artificial Sequence: Synthetic oligonucleotide
aagaatcagcagccatag

SEQ ID NO: 2491 - DNA, 18 bp, Artificial Sequence
  Description of Artificial Sequence: Synthetic oligonucleotide
ggtgtaagaatcagcagc

SEQ ID NO: 2492 - DNA, 18 bp, Artificial Sequence
  Description of Artificial Sequence: Synthetic oligonucleotide
gaatcggtgtaagaatca

SEQ ID NO: 2493 - DNA, 18 bp, Artificial Sequence
  Description of Artificial Sequence: Synthetic oligonucleotide
tgtaagaatcggtgtaag

SEQ ID NO: 2494 - DNA, 18 bp, Artificial Sequence
  Description of Artificial Sequence: Synthetic oligonucleotide
gtcagtgtaagaatcggt

SEQ ID NO: 2495 - DNA, 18 bp, Artificial Sequence
  Description of Artificial Sequence: Synthetic oligonucleotide
tatgtgtcagtgtaagaa

SEQ ID NO: 2496 - DNA, 18 bp, Artificial Sequence
  Description of Artificial Sequence: Synthetic oligonucleotide
ctgtatatgtgtcagtgt

SEQ ID NO: 2497 - DNA, 18 bp, Artificial Sequence
  Description of Artificial Sequence: Synthetic oligonucleotide
tgcctctgtatatgtgtc

SEQ ID NO: 2498 - DNA, 18 bp, Artificial Sequence
  Description of Artificial Sequence: Synthetic oligonucleotide
atatatgcctctgtatat

SEQ ID NO: 2499 - DNA, 18 bp, Artificial Sequence
  Description of Artificial Sequence: Synthetic oligonucleotide
gcaccatatatgcctctg

SEQ ID NO: 2500 - DNA, 18 bp, Artificial Sequence
  Description of Artificial Sequence: Synthetic oligonucleotide
aggtggcaccatatatgc

SEQ ID NO: 2501 - DNA, 18 bp, Artificial Sequence
  Description of Artificial Sequence: Synthetic oligonucleotide
ggcaaaggtggcaccata

SEQ ID NO: 2502 - DNA, 18 bp, Artificial Sequence
  Description of Artificial Sequence: Synthetic oligonucleotide
caggaggcaaaggtggca

SEQ ID NO: 2503 - DNA, 18 bp, Artificial Sequence
  Description of Artificial Sequence: Synthetic oligonucleotide
ctcttcaggaggcaaagg

SEQ ID NO: 2504 - DNA, 18 bp, Artificial Sequence
  Description of Artificial Sequence: Synthetic oligonucleotide
gggggctcttcaggaggc

SEQ ID NO: 2505 - DNA, 18 bp, Artificial Sequence
  Description of Artificial Sequence: Synthetic oligonucleotide
ttgttgggggctcttcag

SEQ ID NO: 2506 - DNA, 18 bp, Artificial Sequence
  Description of Artificial Sequence: Synthetic oligonucleotide
tggcattgttgggggctc

SEQ ID NO: 2507 - DNA, 18 bp, Artificial Sequence
  Description of Artificial Sequence: Synthetic oligonucleotide
aacggtggcattgttggg

SEQ ID NO: 2508 - DNA, 18 bp, Artificial Sequence
  Description of Artificial Sequence: Synthetic oligonucleotide
gtggcaacggtggcattg

SEQ ID NO: 2509 - DNA, 18 bp, Artificial Sequence
  Description of Artificial Sequence: Synthetic oligonucleotide
ctcaggtggcaacggtgg

SEQ ID NO: 2510 - DNA, 18 bp, Artificial Sequence
  Description of Artificial Sequence: Synthetic oligonucleotide
ggctcctcaggtggcaac

SEQ ID NO: 2511 - DNA, 18 bp, Artificial Sequence
  Description of Artificial Sequence: Synthetic oligonucleotide
ttggtggctcctcaggtg

SEQ ID NO: 2512 - DNA, 18 bp, Artificial Sequence
  Description of Artificial Sequence: Synthetic oligonucleotide
tgtcattggtggctcctc

SEQ ID NO: 2513 - DNA, 18 bp, Artificial Sequence
  Description of Artificial Sequence: Synthetic oligonucleotide
ggtggtgtcattggtggc

SEQ ID NO: 2514 - DNA, 18 bp, Artificial Sequence
  Description of Artificial Sequence: Synthetic oligonucleotide
gcaatggtggtgtcattg

SEQ ID NO: 2515 - DNA, 18 bp, Artificial Sequence
  Description of Artificial Sequence: Synthetic oligonucleotide
aggaggcaatggtggtgt

SEQ ID NO: 2516 - DNA, 18 bp, Artificial Sequence
  Description of Artificial Sequence: Synthetic oligonucleotide
tcctcaggaggcaatggt

SEQ ID NO: 2517 - DNA, 18 bp, Artificial Sequence
  Description of Artificial Sequence: Synthetic oligonucleotide
gtggttcctcaggaggca

SEQ ID NO: 2518 - DNA, 18 bp, Artificial Sequence
  Description of Artificial Sequence: Synthetic oligonucleotide
ctctggtggttcctcagg

SEQ ID NO: 2519 - DNA, 18 bp, Artificial Sequence
  Description of Artificial Sequence: Synthetic oligonucleotide
ggaccctctggtggttcc

SEQ ID NO: 2520 - DNA, 18 bp, Artificial Sequence
  Description of Artificial Sequence: Synthetic oligonucleotide
atgctggaccctctggtg

SEQ ID NO: 2521 - DNA, 18 bp, Artificial Sequence
  Description of Artificial Sequence: Synthetic oligonucleotide
gggcaatgctggaccctc

SEQ ID NO: 2522 - DNA, 18 bp, Artificial Sequence
  Description of Artificial Sequence: Synthetic oligonucleotide
tcagtgggcaatgctgga

SEQ ID NO: 2523 - DNA, 18 bp, Artificial Sequence
  Description of Artificial Sequence: Synthetic oligonucleotide
actgctcagtgggcaatg

SEQ ID NO: 2524 - DNA, 18 bp, Artificial Sequence
  Description of Artificial Sequence: Synthetic oligonucleotide
tgctgactgctcagtggg

SEQ ID NO: 2525 - DNA, 18 bp, Artificial Sequence
  Description of Artificial Sequence: Synthetic oligonucleotide
gttaatgctgactgctca

SEQ ID NO: 2526 - DNA, 18 bp, Artificial Sequence
  Description of Artificial Sequence: Synthetic oligonucleotide
cagctgttaatgctgact

SEQ ID NO: 2527 - DNA, 18 bp, Artificial Sequence
  Description of Artificial Sequence: Synthetic oligonucleotide
attttcagctgttaatgc

SEQ ID NO: 2528 - DNA, 18 bp, Artificial Sequence
  Description of Artificial Sequence: Synthetic oligonucleotide
caagtattttcagctgtt

SEQ ID NO: 2529 - DNA, 18 bp, Artificial Sequence
  Description of Artificial Sequence: Synthetic oligonucleotide
taggccaagtattttcag

SEQ ID NO: 2530 - DNA, 18 bp, Artificial Sequence
  Description of Artificial Sequence: Synthetic oligonucleotide
ctctgtaggccaagtatt

SEQ ID NO: 2531 - DNA, 18 bp, Artificial Sequence
  Description of Artificial Sequence: Synthetic oligonucleotide
ggcacctctgtaggccaa

SEQ ID NO: 2532 - DNA, 18 bp, Artificial Sequence
  Description of Artificial Sequence: Synthetic oligonucleotide
atgatggcacctctgtag

SEQ ID NO: 2533 - DNA, 18 bp, Artificial Sequence
  Description of Artificial Sequence: Synthetic oligonucleotide
tggtgatgatggcacctc

SEQ ID NO: 2534 - DNA, 18 bp, Artificial Sequence
  Description of Artificial Sequence: Synthetic oligonucleotide
tcagatggtgatgatggc

SEQ ID NO: 2535 - DNA, 18 bp, Artificial Sequence
  Description of Artificial Sequence: Synthetic oligonucleotide
actcttcagatggtgatg

SEQ ID NO: 2536 - DNA, 18 bp, Artificial Sequence
  Description of Artificial Sequence: Synthetic oligonucleotide
tacagactcttcagatgg

SEQ ID NO: 2537 - DNA, 18 bp, Artificial Sequence
  Description of Artificial Sequence: Synthetic oligonucleotide
tgcgatacagactcttca

SEQ ID NO: 2538 - DNA, 18 bp, Artificial Sequence
  Description of Artificial Sequence: Synthetic oligonucleotide
caggctgcgatacagact

SEQ ID NO: 2539 - DNA, 18 bp, Artificial Sequence
  Description of Artificial Sequence: Synthetic oligonucleotide
aggctcaggctgcgatac

SEQ ID NO: 2540 - DNA, 18 bp, Artificial Sequence
  Description of Artificial Sequence: Synthetic oligonucleotide
acaggaggctcaggctgc

SEQ ID NO: 2541 - DNA, 18 bp, Artificial Sequence
  Description of Artificial Sequence: Synthetic oligonucleotide
gactcacaggaggctcag

SEQ ID NO: 2542 - DNA, 18 bp, Artificial Sequence
  Description of Artificial Sequence: Synthetic oligonucleotide
actttgactcacaggagg

SEQ ID NO: 2543 - DNA, 18 bp, Artificial Sequence
  Description of Artificial Sequence: Synthetic oligonucleotide
atctcactttgactcaca

SEQ ID NO: 2544 - DNA, 18 bp, Artificial Sequence
  Description of Artificial Sequence: Synthetic oligonucleotide
ccgaaatctcactttgac

SEQ ID NO: 2545 - DNA, 18 bp, Artificial Sequence
  Description of Artificial Sequence: Synthetic oligonucleotide
aggctccgaaatctcact

SEQ ID NO: 2546 - DNA, 18 bp, Artificial Sequence
  Description of Artificial Sequence: Synthetic oligonucleotide
gctgaaggctccgaaatc

SEQ ID NO: 2547 - DNA, 18 bp, Artificial Sequence
  Description of Artificial Sequence: Synthetic oligonucleotide
gcactgctgaaggctccg

SEQ ID NO: 2548 - DNA, 18 bp, Artificial Sequence
  Description of Artificial Sequence: Synthetic oligonucleotide
agtaggcactgctgaagg

SEQ ID NO: 2549 - DNA, 18 bp, Artificial Sequence
  Description of Artificial Sequence: Synthetic oligonucleotide
taatcagtaggcactgct

SEQ ID NO: 2550 - DNA, 18 bp, Artificial Sequence
  Description of Artificial Sequence: Synthetic oligonucleotide
ctgaataatcagtaggca

SEQ ID NO: 2551 - DNA, 18 bp, Artificial Sequence
  Description of Artificial Sequence: Synthetic oligonucleotide
tgacactgaataatcagt

SEQ ID NO: 2552 - DNA, 18 bp, Artificial Sequence
  Description of Artificial Sequence: Synthetic oligonucleotide
gatgctgacactgaataa

SEQ ID NO: 2553 - DNA, 18 bp, Artificial Sequence
  Description of Artificial Sequence: Synthetic oligonucleotide
gatctgatgctgacactg

SEQ ID NO: 2554 - DNA, 18 bp, Artificial Sequence
  Description of Artificial Sequence: Synthetic oligonucleotide
tgagggatctgatgctga

SEQ ID NO: 2555 - DNA, 18 bp, Artificial Sequence
  Description of Artificial Sequence: Synthetic oligonucleotide
aaaactgagggatctgat

SEQ ID NO: 2556 - DNA, 18 bp, Artificial Sequence
  Description of Artificial Sequence: Synthetic oligonucleotide
atactaaaactgagggat

SEQ ID NO: 2557 - DNA, 18 bp, Artificial Sequence
  Description of Artificial Sequence: Synthetic oligonucleotide
ctctgatactaaaactga

SEQ ID NO: 2558 - DNA, 18 bp, Artificial Sequence
  Description of Artificial Sequence: Synthetic oligonucleotide
gcagcctctgatactaaa

SEQ ID NO: 2559 - DNA, 18 bp, Artificial Sequence
  Description of Artificial Sequence: Synthetic oligonucleotide
tcacagcagcctctgata

SEQ ID NO: 2560 - DNA, 18 bp, Artificial Sequence
  Description of Artificial Sequence: Synthetic oligonucleotide
aacagtcacagcagcctc

SEQ ID NO: 2561 - DNA, 18 bp, Artificial Sequence
  Description of Artificial Sequence: Synthetic oligonucleotide
tctggaacagtcacagca

SEQ ID NO: 2562 - DNA, 18 bp, Artificial Sequence
  Description of Artificial Sequence: Synthetic oligonucleotide
gtggttctggaacagtca

SEQ ID NO: 2563 - DNA, 18 bp, Artificial Sequence
  Description of Artificial Sequence: Synthetic oligonucleotide
tggtggtggttctggaac

SEQ ID NO: 2564 - DNA, 18 bp, Artificial Sequence
  Description of Artificial Sequence: Synthetic oligonucleotide
ggctctggtggtggttct

SEQ ID NO: 2565 - DNA, 18 bp, Artificial Sequence
  Description of Artificial Sequence: Synthetic oligonucleotide
attctggctctggtggtg

SEQ ID NO: 2566 - DNA, 18 bp, Artificial Sequence
  Description of Artificial Sequence: Synthetic oligonucleotide
tgaagattctggctctgg

SEQ ID NO: 2567 - DNA, 18 bp, Artificial Sequence
  Description of Artificial Sequence: Synthetic oligonucleotide
gtaattgaagattctggc

SEQ ID NO: 2568 - DNA, 18 bp, Artificial Sequence
  Description of Artificial Sequence: Synthetic oligonucleotide
ttaacgtaattgaagatt

SEQ ID NO: 2569 - DNA, 18 bp, Artificial Sequence
  Description of Artificial Sequence: Synthetic oligonucleotide
aggtgttaacgtaattga

SEQ ID NO: 2570 - DNA, 18 bp, Artificial Sequence
  Description of Artificial Sequence: Synthetic oligonucleotide
tctacaggtgttaacgta

SEQ ID NO: 2571 - DNA, 18 bp, Artificial Sequence
  Description of Artificial Sequence: Synthetic oligonucleotide
cagactctacaggtgtta

SEQ ID NO: 2572 - DNA, 18 bp, Artificial Sequence
  Description of Artificial Sequence: Synthetic oligonucleotide
tactgcagactctacagg

SEQ ID NO: 2573 - DNA, 18 bp, Artificial Sequence
  Description of Artificial Sequence: Synthetic oligonucleotide
gctactactgcagactct

SEQ ID NO: 2574 - DNA, 18 bp, Artificial Sequence
  Description of Artificial Sequence: Synthetic oligonucleotide
cttctgctactactgcag

SEQ ID NO: 2575 - DNA, 18 bp, Artificial Sequence
  Description of Artificial Sequence: Synthetic oligonucleotide
atgttcttctgctactac

SEQ ID NO: 2576 - DNA, 18 bp, Artificial Sequence
  Description of Artificial Sequence: Synthetic oligonucleotide
acttcatgttcttctgct

SEQ ID NO: 2577 - DNA, 18 bp, Artificial Sequence
  Description of Artificial Sequence: Synthetic oligonucleotide
gaacaacttcatgttctt

SEQ ID NO: 2578 - DNA, 18 bp, Artificial Sequence
  Description of Artificial Sequence: Synthetic oligonucleotide
ctctggaacaacttcatg

SEQ ID NO: 2579 - DNA, 18 bp, Artificial Sequence
  Description of Artificial Sequence: Synthetic oligonucleotide
ggtctctctggaacaact

SEQ ID NO: 2580 - DNA, 18 bp, Artificial Sequence
  Description of Artificial Sequence: Synthetic oligonucleotide
tcactggtctctctggaa

SEQ ID NO: 2581 - DNA, 18 bp, Artificial Sequence
  Description of Artificial Sequence: Synthetic oligonucleotide
acaagtcactggtctctc

SEQ ID NO: 2582 - DNA, 18 bp, Artificial Sequence
  Description of Artificial Sequence: Synthetic oligonucleotide
accatacaagtcactggt

SEQ ID NO: 2583 - DNA, 18 bp, Artificial Sequence
  Description of Artificial Sequence: Synthetic oligonucleotide
cagataccatacaagtca

SEQ ID NO: 2584 - DNA, 18 bp, Artificial Sequence
  Description of Artificial Sequence: Synthetic oligonucleotide
agtttcagataccataca

SEQ ID NO: 2585 - DNA, 18 bp, Artificial Sequence
  Description of Artificial Sequence: Synthetic oligonucleotide
gcgggagtttcagatacc

SEQ ID NO: 2586 - DNA, 18 bp, Artificial Sequence
  Description of Artificial Sequence: Synthetic oligonucleotide
acatggcgggagtttcag

SEQ ID NO: 2587 - DNA, 18 bp, Artificial Sequence
  Description of Artificial Sequence: Synthetic oligonucleotide
agctgacatggcgggagt

SEQ ID NO: 2588 - DNA, 18 bp, Artificial Sequence
  Description of Artificial Sequence: Synthetic oligonucleotide
ggttcagctgacatggcg

SEQ ID NO: 2589 - DNA, 18 bp, Artificial Sequence
  Description of Artificial Sequence: Synthetic oligonucleotide
cagttggttcagctgaca

SEQ ID NO: 2590 - DNA, 18 bp, Artificial Sequence
  Description of Artificial Sequence: Synthetic oligonucleotide
taacacagttggttcagc

SEQ ID NO: 2591 - DNA, 18 bp, Artificial Sequence
  Description of Artificial Sequence: Synthetic oligonucleotide
gatgctaacacagttggt

SEQ ID NO: 2592 - DNA, 18 bp, Artificial Sequence
  Description of Artificial Sequence: Synthetic oligonucleotide
gctctgatgctaacacag

SEQ ID NO: 2593 - DNA, 18 bp, Artificial Sequence
  Description of Artificial Sequence: Synthetic oligonucleotide
aggaggctctgatgctaa

SEQ ID NO: 2594 - DNA, 18 bp, Artificial Sequence
  Description of Artificial Sequence: Synthetic oligonucleotide
ataacaggaggctctgat

SEQ ID NO: 2595 - DNA, 18 bp, Artificial Sequence
  Description of Artificial Sequence: Synthetic oligonucleotide
ctgacataacaggaggct

SEQ ID NO: 2596 - DNA, 18 bp, Artificial Sequence
  Description of Artificial Sequence: Synthetic oligonucleotide
tgtctctgacataacagg

SEQ ID NO: 2597 - DNA, 18 bp, Artificial Sequence
  Description of Artificial Sequence: Synthetic oligonucleotide
tctgctgtctctgacata

SEQ ID NO: 2598 - DNA, 18 bp, Artificial Sequence
  Description of Artificial Sequence: Synthetic oligonucleotide
atgtttctgctgtctctg

SEQ ID NO: 2599 - DNA, 18 bp, Artificial Sequence
  Description of Artificial Sequence: Synthetic oligonucleotide
atcaaatgtttctgctgt

SEQ ID NO: 2600 - DNA, 18 bp, Artificial Sequence
  Description of Artificial Sequence: Synthetic oligonucleotide
atggaatcaaatgtttct

SEQ ID NO: 2601 - DNA, 18 bp, Artificial Sequence
  Description of Artificial Sequence: Synthetic oligonucleotide
ctctcatggaatcaaatg

SEQ ID NO: 2602 - DNA, 18 bp, Artificial Sequence
  Description of Artificial Sequence: Synthetic oligonucleotide
tgaggctctcatggaatc

SEQ ID NO: 2603 - DNA, 18 bp, Artificial Sequence
  Description of Artificial Sequence: Synthetic oligonucleotide
tgtcctgaggctctcatg

SEQ ID NO: 2604 - DNA, 18 bp, Artificial Sequence
  Description of Artificial Sequence: Synthetic oligonucleotide
caacatgtcctgaggctc

SEQ ID NO: 2605 - DNA, 18 bp, Artificial Sequence
  Description of Artificial Sequence: Synthetic oligonucleotide
tgaggcaacatgtcctga

SEQ ID NO: 2606 - DNA, 18 bp, Artificial Sequence
  Description of Artificial Sequence: Synthetic oligonucleotide
acttctgaggcaacatgt

SEQ ID NO: 2607 - DNA, 18 bp, Artificial Sequence
  Description of Artificial Sequence: Synthetic oligonucleotide
tagatacttctgaggcaa

SEQ ID NO: 2608 - DNA, 18 bp, Artificial Sequence
  Description of Artificial Sequence: Synthetic oligonucleotide
ggatgtagatacttctga

SEQ ID NO: 2609 - DNA, 18 bp, Artificial Sequence
  Description of Artificial Sequence: Synthetic oligonucleotide
aacaaggatgtagatact

SEQ ID NO: 2610 - DNA, 18 bp, Artificial Sequence
  Description of Artificial Sequence: Synthetic oligonucleotide
gaaccaacaaggatgtag

SEQ ID NO: 2611 - DNA, 18 bp, Artificial Sequence
  Description of Artificial Sequence: Synthetic oligonucleotide
tgctggaaccaacaagga

SEQ ID NO: 2612 - DNA, 18 bp, Artificial Sequence
  Description of Artificial Sequence: Synthetic oligonucleotide
gttactgctggaaccaac

SEQ ID NO: 2613 - DNA, 18 bp, Artificial Sequence
  Description of Artificial Sequence: Synthetic oligonucleotide
gagtagttactgctggaa

SEQ ID NO: 2614 - DNA, 18 bp, Artificial Sequence
  Description of Artificial Sequence: Synthetic oligonucleotide
cactggagtagttactgc

SEQ ID NO: 2615 - DNA, 18 bp, Artificial Sequence
  Description of Artificial Sequence: Synthetic oligonucleotide
gccagcactggagtagtt

SEQ ID NO: 2616 - DNA, 18 bp, Artificial Sequence
  Description of Artificial Sequence: Synthetic oligonucleotide
tctctgccagcactggag

SEQ ID NO: 2617 - DNA, 18 bp, Artificial Sequence
  Description of Artificial Sequence: Synthetic oligonucleotide
aatgctctctgccagcac

SEQ ID NO: 2618 - DNA, 18 bp, Artificial Sequence
  Description of Artificial Sequence: Synthetic oligonucleotide
tccagaatgctctctgcc

SEQ ID NO: 2619 - DNA, 18 bp, Artificial Sequence
  Description of Artificial Sequence: Synthetic oligonucleotide
gcggctccagaatgctct

SEQ ID NO: 2620 - DNA, 18 bp, Artificial Sequence
  Description of Artificial Sequence: Synthetic oligonucleotide
ggctggcggctccagaat

SEQ ID NO: 2621 - DNA, 18 bp, Artificial Sequence
  Description of Artificial Sequence: Synthetic oligonucleotide
gccatggctggcggctcc

SEQ ID NO: 2622 - DNA, 18 bp, Artificial Sequence
  Description of Artificial Sequence: Synthetic oligonucleotide
gggcagccatggctggcg

SEQ ID NO: 2623 - DNA, 18 bp, Artificial Sequence
  Description of Artificial Sequence: Synthetic oligonucleotide
ctctggggcagccatggc

SEQ ID NO: 2624 - DNA, 18 bp, Artificial Sequence
  Description of Artificial Sequence: Synthetic oligonucleotide
gaagactctggggcagcc

SEQ ID NO: 2625 - DNA, 18 bp, Artificial Sequence
  Description of Artificial Sequence: Synthetic oligonucleotide
tagctgaagactctgggg

SEQ ID NO: 2626 - DNA, 18 bp, Artificial Sequence
  Description of Artificial Sequence: Synthetic oligonucleotide
agccatagctgaagactc

SEQ ID NO: 2627 - DNA, 18 bp, Artificial Sequence
  Description of Artificial Sequence: Synthetic oligonucleotide
aggacagccatagctgaa

SEQ ID NO: 2628 - DNA, 18 bp, Artificial Sequence
  Description of Artificial Sequence: Synthetic oligonucleotide
actccaggacagccatag

SEQ ID NO: 2629 - DNA, 18 bp, Artificial Sequence
  Description of Artificial Sequence: Synthetic oligonucleotide
cgaagactccaggacagc

SEQ ID NO: 2630 - DNA, 18 bp, Artificial Sequence
  Description of Artificial Sequence: Synthetic oligonucleotide
acagccgaagactccagg

SEQ ID NO: 2631 - DNA, 18 bp, Artificial Sequence
  Description of Artificial Sequence: Synthetic oligonucleotide
cggtcacagccgaagact

SEQ ID NO: 2632 - DNA, 18 bp, Artificial Sequence
  Description of Artificial Sequence: Synthetic oligonucleotide
caggacggtcacagccga

SEQ ID NO: 2633 - DNA, 18 bp, Artificial Sequence
  Description of Artificial Sequence: Synthetic oligonucleotide
gactccaggacggtcaca

SEQ ID NO: 2634 - DNA, 18 bp, Artificial Sequence
  Description of Artificial Sequence: Synthetic oligonucleotide
tcgaagactccaggacgg

SEQ ID NO: 2635 - DNA, 18 bp, Artificial Sequence
  Description of Artificial Sequence: Synthetic oligonucleotide
cacagtcgaagactccag

SEQ ID NO: 2636 - DNA, 18 bp, Artificial Sequence
  Description of Artificial Sequence: Synthetic oligonucleotide
acagtcacagtcgaagac

SEQ ID NO: 2637 - DNA, 18 bp, Artificial Sequence
  Description of Artificial Sequence: Synthetic oligonucleotide
ccaggacagtcacagtcg

SEQ ID NO: 2638 - DNA, 18 bp, Artificial Sequence
  Description of Artificial Sequence: Synthetic oligonucleotide
agactccaggacagtcac

SEQ ID NO: 2639 - DNA, 18 bp, Artificial Sequence
  Description of Artificial Sequence: Synthetic oligonucleotide
gtcgaagactccaggaca

SEQ ID NO: 2640 - DNA, 18 bp, Artificial Sequence
  Description of Artificial Sequence: Synthetic oligonucleotide
ttacagtcgaagactcca

SEQ ID NO: 2641 - DNA, 18 bp, Artificial Sequence
  Description of Artificial Sequence: Synthetic oligonucleotide
gacagttacagtcgaaga

SEQ ID NO: 2642 - DNA, 18 bp, Artificial Sequence
  Description of Artificial Sequence: Synthetic oligonucleotide
tccaggacagttacagtc

SEQ ID NO: 2643 - DNA, 18 bp, Artificial Sequence
  Description of Artificial Sequence: Synthetic oligonucleotide
aaggctccaggacagtta

SEQ ID NO: 2644 - DNA, 18 bp, Artificial Sequence
  Description of Artificial Sequence: Synthetic oligonucleotide
aaccgaaggctccaggac

SEQ ID NO: 2645 - DNA, 18 bp, Artificial Sequence
  Description of Artificial Sequence: Synthetic oligonucleotide
gtcacaaccgaaggctcc

SEQ ID NO: 2646 - DNA, 18 bp, Artificial Sequence
  Description of Artificial Sequence: Synthetic oligonucleotide
ggacagtcacaaccgaag

SEQ ID NO: 2647 - DNA, 18 bp, Artificial Sequence
  Description of Artificial Sequence: Synthetic oligonucleotide
ctccgggacagtcacaac

SEQ ID NO: 2648 - DNA, 18 bp, Artificial Sequence
  Description of Artificial Sequence: Synthetic oligonucleotide
ggaggctccgggacagtc

SEQ ID NO: 2649 - DNA, 18 bp, Artificial Sequence
  Description of Artificial Sequence: Synthetic oligonucleotide
caacaggaggctccggga

SEQ ID NO: 2650 - DNA, 18 bp, Artificial Sequence
  Description of Artificial Sequence: Synthetic oligonucleotide
agccacaacaggaggctc

SEQ ID NO: 2651 - DNA, 18 bp, Artificial Sequence
  Description of Artificial Sequence: Synthetic oligonucleotide
ggctcagccacaacagga

SEQ ID NO: 2652 - DNA, 18 bp, Artificial Sequence
  Description of Artificial Sequence: Synthetic oligonucleotide
agtctggctcagccacaa

SEQ ID NO: 2653 - DNA, 18 bp, Artificial Sequence
  Description of Artificial Sequence: Synthetic oligonucleotide
aacatagtctggctcagc

SEQ ID NO: 2654 - DNA, 18 bp, Artificial Sequence
  Description of Artificial Sequence: Synthetic oligonucleotide
atggtaacatagtctggc

SEQ ID NO: 2655 - DNA, 18 bp, Artificial Sequence
  Description of Artificial Sequence: Synthetic oligonucleotide
caggaatggtaacatagt

SEQ ID NO: 2656 - DNA, 18 bp, Artificial Sequence
  Description of Artificial Sequence: Synthetic oligonucleotide
tggcacaggaatggtaac

SEQ ID NO: 2657 - DNA, 18 bp, Artificial Sequence
  Description of Artificial Sequence: Synthetic oligonucleotide
acaactggcacaggaatg

SEQ ID NO: 2658 - DNA, 18 bp, Artificial Sequence
  Description of Artificial Sequence: Synthetic oligonucleotide
cagaaacaactggcacag

SEQ ID NO: 2659 - DNA, 18 bp, Artificial Sequence
  Description of Artificial Sequence: Synthetic oligonucleotide
cagcgcagaaacaactgg

SEQ ID NO: 2660 - DNA, 18 bp, Artificial Sequence
  Description of Artificial Sequence: Synthetic oligonucleotide
ggctccagcgcagaaaca

SEQ ID NO: 2661 - DNA, 18 bp, Artificial Sequence
  Description of Artificial Sequence: Synthetic oligonucleotide
cagaaggctccagcgcag

SEQ ID NO: 2662 - DNA, 18 bp, Artificial Sequence
  Description of Artificial Sequence: Synthetic oligonucleotide
aggcacagaaggctccag

SEQ ID NO: 2663 - DNA, 18 bp, Artificial Sequence
  Description of Artificial Sequence: Synthetic oligonucleotide
agaacaggcacagaaggc

SEQ ID NO: 2664 - DNA, 18 bp, Artificial Sequence
  Description of Artificial Sequence: Synthetic oligonucleotide
gttccagaacaggcacag

SEQ ID NO: 2665 - DNA, 18 bp, Artificial Sequence
  Description of Artificial Sequence: Synthetic oligonucleotide
cgctggttccagaacagg

SEQ ID NO: 2666 - DNA, 18 bp, Artificial Sequence
  Description of Artificial Sequence: Synthetic oligonucleotide
gacaccgctggttccaga

SEQ ID NO: 2667 - DNA, 18 bp, Artificial Sequence
  Description of Artificial Sequence: Synthetic oligonucleotide
ggactgacaccgctggtt

SEQ ID NO: 2668 - DNA, 18 bp, Artificial Sequence
  Description of Artificial Sequence: Synthetic oligonucleotide
ttgaaggactgacaccgc

SEQ ID NO: 2669 - DNA, 18 bp, Artificial Sequence
  Description of Artificial Sequence: Synthetic oligonucleotide
gaaggttgaaggactgac

SEQ ID NO: 2670 - DNA, 18 bp, Artificial Sequence
  Description of Artificial Sequence: Synthetic oligonucleotide
tcatagaaggttgaagga

SEQ ID NO: 2671 - DNA, 18 bp, Artificial Sequence
  Description of Artificial Sequence: Synthetic oligonucleotide
aacaatcatagaaggttg

SEQ ID NO: 2672 - DNA, 18 bp, Artificial Sequence
  Description of Artificial Sequence: Synthetic oligonucleotide
tctgaaacaatcatagaa

SEQ ID NO: 2673 - DNA, 18 bp, Artificial Sequence
  Description of Artificial Sequence: Synthetic oligonucleotide
atggttctgaaacaatca

SEQ ID NO: 2674 - DNA, 18 bp, Artificial Sequence
  Description of Artificial Sequence: Synthetic oligonucleotide
aacagatggttctgaaac

SEQ ID NO: 2675 - DNA, 18 bp, Artificial Sequence
  Description of Artificial Sequence: Synthetic oligonucleotide
acagaaacagatggttct

SEQ ID NO: 2676 - DNA, 18 bp, Artificial Sequence
  Description of Artificial Sequence: Synthetic oligonucleotide
cctggacagaaacagatg

SEQ ID NO: 2677 - DNA, 18 bp, Artificial Sequence
  Description of Artificial Sequence: Synthetic oligonucleotide
cgattcctggacagaaac

SEQ ID NO: 2678 - DNA, 18 bp, Artificial Sequence
  Description of Artificial Sequence: Synthetic oligonucleotide
acagtcgattcctggaca

SEQ ID NO: 2679 - DNA, 18 bp, Artificial Sequence
  Description of Artificial Sequence: Synthetic oligonucleotide
ctgtcacagtcgattcct

SEQ ID NO: 2680 - DNA, 18 bp, Artificial Sequence
  Description of Artificial Sequence: Synthetic oligonucleotide
tgaaactgtcacagtcga

SEQ ID NO: 2681 - DNA, 18 bp, Artificial Sequence
  Description of Artificial Sequence: Synthetic oligonucleotide
ggctctgaaactgtcaca

SEQ ID NO: 2682 - DNA, 18 bp, Artificial Sequence
  Description of Artificial Sequence: Synthetic oligonucleotide
cagcaggctctgaaactg

SEQ ID NO: 2683 - DNA, 18 bp, Artificial Sequence
  Description of Artificial Sequence: Synthetic oligonucleotide
tgtgacagcaggctctga

SEQ ID NO: 2684 - DNA, 18 bp, Artificial Sequence
  Description of Artificial Sequence: Synthetic oligonucleotide
gagactgtgacagcaggc

SEQ ID NO: 2685 - DNA, 18 bp, Artificial Sequence
  Description of Artificial Sequence: Synthetic oligonucleotide
gctctgagactgtgacag

SEQ ID NO: 2686 - DNA, 18 bp, Artificial Sequence
  Description of Artificial Sequence: Synthetic oligonucleotide
agtctgctctgagactgt

SEQ ID NO: 2687 - DNA, 18 bp, Artificial Sequence
  Description of Artificial Sequence: Synthetic oligonucleotide
acttgagtctgctctgag

SEQ ID NO: 2688 - DNA, 18 bp, Artificial Sequence
  Description of Artificial Sequence: Synthetic oligonucleotide
gtattacttgagtctgct

SEQ ID NO: 2689 - DNA, 18 bp, Artificial Sequence
  Description of Artificial Sequence: Synthetic oligonucleotide
agttggtattacttgagt

SEQ ID NO: 2690 - DNA, 18 bp, Artificial Sequence
  Description of Artificial Sequence: Synthetic oligonucleotide
acctcagttggtattact

SEQ ID NO: 2691 - DNA, 18 bp, Artificial Sequence
  Description of Artificial Sequence: Synthetic oligonucleotide
tagccacctcagttggta

SEQ ID NO: 2692 - DNA, 18 bp, Artificial Sequence
  Description of Artificial Sequence: Synthetic oligonucleotide
ctctatagccacctcagt

SEQ ID NO: 2693 - DNA, 18 bp, Artificial Sequence
  Description of Artificial Sequence: Synthetic oligonucleotide
gtggactctatagccacc

SEQ ID NO: 2694 - DNA, 18 bp, Artificial Sequence
  Description of Artificial Sequence: Synthetic oligonucleotide
ttggtgtggactctatag

SEQ ID NO: 2695 - DNA, 18 bp, Artificial Sequence
  Description of Artificial Sequence: Synthetic oligonucleotide
tatcattggtgtggactc

SEQ ID NO: 2696 - DNA, 18 bp, Artificial Sequence
  Description of Artificial Sequence: Synthetic oligonucleotide
tccagtatcattggtgtg

SEQ ID NO: 2697 - DNA, 18 bp, Artificial Sequence
  Description of Artificial Sequence: Synthetic oligonucleotide
tagattccagtatcattg

SEQ ID NO: 2698 - DNA, 18 bp, Artificial Sequence
  Description of Artificial Sequence: Synthetic oligonucleotide
gatactagattccagtat

SEQ ID NO: 2699 - DNA, 18 bp, Artificial Sequence
  Description of Artificial Sequence: Synthetic oligonucleotide
gacatgatactagattcc

SEQ ID NO: 2700 - DNA, 18 bp, Artificial Sequence
  Description of Artificial Sequence: Synthetic oligonucleotide
gtgatgacatgatactag

SEQ ID NO: 2701 - DNA, 18 bp, Artificial Sequence
  Description of Artificial Sequence: Synthetic oligonucleotide
aacatgtgatgacatgat

SEQ ID NO: 2702 - DNA, 18 bp, Artificial Sequence
  Description of Artificial Sequence: Synthetic oligonucleotide
ttcataacatgtgatgac

SEQ ID NO: 2703 - DNA, 18 bp, Artificial Sequence
  Description of Artificial Sequence: Synthetic oligonucleotide
ttcctttcataacatgtg

SEQ ID NO: 2704 - DNA, 18 bp, Artificial Sequence
  Description of Artificial Sequence: Synthetic oligonucleotide
attaattcctttcataac

SEQ ID NO: 2705 - DNA, 18 bp, Artificial Sequence
  Description of Artificial Sequence: Synthetic oligonucleotide
gatagattaattcctttc

SEQ ID NO: 2706 - DNA, 18 bp, Artificial Sequence
  Description of Artificial Sequence: Synthetic oligonucleotide
cagaggatagattaattc

SEQ ID NO: 2707 - DNA, 18 bp, Artificial Sequence
  Description of Artificial Sequence: Synthetic oligonucleotide
atcaccagaggatagatt

SEQ ID NO: 2708 - DNA, 18 bp, Artificial Sequence
  Description of Artificial Sequence: Synthetic oligonucleotide
ttttgatcaccagaggat

SEQ ID NO: 2709 - DNA, 18 bp, Artificial Sequence
  Description of Artificial Sequence: Synthetic oligonucleotide
caagattttgatcaccag

SEQ ID NO: 2710 - DNA, 18 bp, Artificial Sequence
  Description of Artificial Sequence: Synthetic oligonucleotide
tggagcaagattttgatc

SEQ ID NO: 2711 - DNA, 18 bp, Artificial Sequence
  Description of Artificial Sequence: Synthetic oligonucleotide
atctctggagcaagattt

SEQ ID NO: 2712 - DNA, 18 bp, Artificial Sequence
  Description of Artificial Sequence: Synthetic oligonucleotide
tgccaatctctggagcaa

SEQ ID NO: 2713 - DNA, 18 bp, Artificial Sequence
  Description of Artificial Sequence: Synthetic oligonucleotide
ctgcatgccaatctctgg

SEQ ID NO: 2714 - DNA, 18 bp, Artificial Sequence
  Description of Artificial Sequence: Synthetic oligonucleotide
atctcctgcatgccaatc

SEQ ID NO: 2715 - DNA, 18 bp, Artificial Sequence
  Description of Artificial Sequence: Synthetic oligonucleotide
atgcaatctcctgcatgc

SEQ ID NO: 2716 - DNA, 18 bp, Artificial Sequence
  Description of Artificial Sequence: Synthetic oligonucleotide
atgcaatgcaatctcctg

SEQ ID NO: 2717 - DNA, 18 bp, Artificial Sequence
  Description of Artificial Sequence: Synthetic oligonucleotide
cctgaatgcaatgcaatc

SEQ ID NO: 2718 - DNA, 18 bp, Artificial Sequence
  Description of Artificial Sequence: Synthetic oligonucleotide
cttcacctgaatgcaatg

SEQ ID NO: 2719 - DNA, 18 bp, Artificial Sequence
  Description of Artificial Sequence: Synthetic oligonucleotide
tggttcttcacctgaatg

SEQ ID NO: 2720 - DNA, 18 bp, Artificial Sequence
  Description of Artificial Sequence: Synthetic oligonucleotide
gcatgtggttcttcacct

SEQ ID NO: 2721 - DNA, 18 bp, Artificial Sequence
  Description of Artificial Sequence: Synthetic oligonucleotide
cctcagcatgtggttctt

SEQ ID NO: 2722 - DNA, 18 bp, Artificial Sequence
  Description of Artificial Sequence: Synthetic oligonucleotide
gtgttcctcagcatgtgg

SEQ ID NO: 2723 - DNA, 18 bp, Artificial Sequence
  Description of Artificial Sequence: Synthetic oligonucleotide
ttcaggtgttcctcagca

SEQ ID NO: 2724 - DNA, 18 bp, Artificial Sequence
  Description of Artificial Sequence: Synthetic oligonucleotide
cacctttcaggtgttcct

SEQ ID NO: 2725 - DNA, 18 bp, Artificial Sequence
  Description of Artificial Sequence: Synthetic oligonucleotide
aaagtcacctttcaggtg

SEQ ID NO: 2726 - DNA, 18 bp, Artificial Sequence
  Description of Artificial Sequence: Synthetic oligonucleotide
tcgtaaaagtcacctttc

SEQ ID NO: 2727 - DNA, 18 bp, Artificial Sequence
  Description of Artificial Sequence: Synthetic oligonucleotide
cactttcgtaaaagtcac

SEQ ID NO: 2728 - DNA, 18 bp, Artificial Sequence
  Description of Artificial Sequence: Synthetic oligonucleotide
atgttcactttcgtaaaa

SEQ ID NO: 2729 - DNA, 18 bp, Artificial Sequence
  Description of Artificial Sequence: Synthetic oligonucleotide
ataccatgttcactttcg

SEQ ID NO: 2730 - DNA, 18 bp, Artificial Sequence
  Description of Artificial Sequence: Synthetic oligonucleotide
tatttataccatgttcac

SEQ ID NO: 2731 - DNA, 18 bp, Artificial Sequence
  Description of Artificial Sequence: Synthetic oligonucleotide
gtctatatttataccatg

SEQ ID NO: 2732 - DNA, 18 bp, Artificial Sequence
  Description of Artificial Sequence: Synthetic oligonucleotide
ttaaggtctatatttata

SEQ ID NO: 2733 - DNA, 18 bp, Artificial Sequence
  Description of Artificial Sequence: Synthetic oligonucleotide
ttatattaaggtctatat

SEQ ID NO: 2734 - DNA, 18 bp, Artificial Sequence
  Description of Artificial Sequence: Synthetic oligonucleotide
aactccatcgctgaggcc

SEQ ID NO: 2735 - DNA, 18 bp, Artificial Sequence
  Description of Artificial Sequence: Synthetic oligonucleotide
ccggcaactccatcgctg

SEQ ID NO: 2736 - DNA, 18 bp, Artificial Sequence
  Description of Artificial Sequence: Synthetic oligonucleotide
tggccccggcaactccat

SEQ ID NO: 2737 - DNA, 18 bp, Artificial Sequence
  Description of Artificial Sequence: Synthetic oligonucleotide
gcaggtggccccggcaac

SEQ ID NO: 2738 - DNA, 18 bp, Artificial Sequence
  Description of Artificial Sequence: Synthetic oligonucleotide
aggtcgcaggtggccccg

SEQ ID NO: 2739 - DNA, 18 bp, Artificial Sequence
  Description of Artificial Sequence: Synthetic oligonucleotide
catggaggtcgcaggtgg

SEQ ID NO: 2740 - DNA, 18 bp, Artificial Sequence
  Description of Artificial Sequence: Synthetic oligonucleotide
tccggcatggaggtcgca

SEQ ID NO: 2741 - DNA, 18 bp, Artificial Sequence
  Description of Artificial Sequence: Synthetic oligonucleotide
gcaactccggcatggagg

SEQ ID NO: 2742 - DNA, 18 bp, Artificial Sequence
  Description of Artificial Sequence: Synthetic oligonucleotide
cccctgcaactccggcat

SEQ ID NO: 2743 - DNA, 18 bp, Artificial Sequence
  Description of Artificial Sequence: Synthetic oligonucleotide
gggggcccctgcaactcc

SEQ ID NO: 2744 - DNA, 18 bp, Artificial Sequence
  Description of Artificial Sequence: Synthetic oligonucleotide
tcacagggggcccctgca

SEQ ID NO: 2745 - DNA, 18 bp, Artificial Sequence
  Description of Artificial Sequence: Synthetic oligonucleotide
tggagtcacagggggccc

SEQ ID NO: 2746 - DNA, 18 bp, Artificial Sequence
  Description of Artificial Sequence: Synthetic oligonucleotide
agcactggagtcacaggg

SEQ ID NO: 2747 - DNA, 18 bp, Artificial Sequence
  Description of Artificial Sequence: Synthetic oligonucleotide
actccagcactggagtca

SEQ ID NO: 2748 - DNA, 18 bp, Artificial Sequence
  Description of Artificial Sequence: Synthetic oligonucleotide
aggtaactccagcactgg

SEQ ID NO: 2749 - DNA, 18 bp, Artificial Sequence
  Description of Artificial Sequence: Synthetic oligonucleotide
ggcccaggtaactccagc

SEQ ID NO: 2750 - DNA, 18 bp, Artificial Sequence
  Description of Artificial Sequence: Synthetic oligonucleotide
cagagggcccaggtaact

SEQ ID NO: 2751 - DNA, 18 bp, Artificial Sequence
  Description of Artificial Sequence: Synthetic oligonucleotide
ggtagcagagggcccagg

SEQ ID NO: 2752 - DNA, 18 bp, Artificial Sequence
  Description of Artificial Sequence: Synthetic oligonucleotide
accggggtagcagagggc

SEQ ID NO: 2753 - DNA, 18 bp, Artificial Sequence
  Description of Artificial Sequence: Synthetic oligonucleotide
ctggcaccggggtagcag

SEQ ID NO: 2754 - DNA, 18 bp, Artificial Sequence
  Description of Artificial Sequence: Synthetic oligonucleotide
caactctggcaccggggt

SEQ ID NO: 2755 - DNA, 18 bp, Artificial Sequence
  Description of Artificial Sequence: Synthetic oligonucleotide
cctggcaactctggcacc

SEQ ID NO: 2756 - DNA, 18 bp, Artificial Sequence
  Description of Artificial Sequence: Synthetic oligonucleotide
ggggccctggcaactctg

SEQ ID NO: 2757 - DNA, 18 bp, Artificial Sequence
  Description of Artificial Sequence: Synthetic oligonucleotide
agaaaggggccctggcaa

SEQ ID NO: 2758 - DNA, 18 bp, Artificial Sequence
  Description of Artificial Sequence: Synthetic oligonucleotide
ggggtagaaaggggccct

SEQ ID NO: 2759 - DNA, 18 bp, Artificial Sequence
  Description of Artificial Sequence: Synthetic oligonucleotide
gcactggggtagaaaggg

SEQ ID NO: 2760 - DNA, 18 bp, Artificial Sequence
  Description of Artificial Sequence: Synthetic oligonucleotide
ctcaggcactggggtaga

SEQ ID NO: 2761 - DNA, 18 bp, Artificial Sequence
  Description of Artificial Sequence: Synthetic oligonucleotide
ggcaactcaggcactggg

SEQ ID NO: 2762 - DNA, 18 bp, Artificial Sequence
  Description of Artificial Sequence: Synthetic oligonucleotide
gccctggcaactcaggca

SEQ ID NO: 2763 - DNA, 18 bp, Artificial Sequence
  Description of Artificial Sequence: Synthetic oligonucleotide
agggggccctggcaactc

SEQ ID NO: 2764 - DNA, 18 bp, Artificial Sequence
  Description of Artificial Sequence: Synthetic oligonucleotide
gtcgcagggggccctggc

SEQ ID NO: 2765 - DNA, 18 bp, Artificial Sequence
  Description of Artificial Sequence: Synthetic oligonucleotide
ctgctgtcgcagggggcc

SEQ ID NO: 2766 - DNA, 18 bp, Artificial Sequence
  Description of Artificial Sequence: Synthetic oligonucleotide
aggcactgctgtcgcagg

SEQ ID NO: 2767 - DNA, 18 bp, Artificial Sequence
  Description of Artificial Sequence: Synthetic oligonucleotide
aactcaggcactgctgtc

SEQ ID NO: 2768 - DNA, 18 bp, Artificial Sequence
  Description of Artificial Sequence: Synthetic oligonucleotide
ctggcaactcaggcactg

SEQ ID NO: 2769 - DNA, 18 bp, Artificial Sequence
  Description of Artificial Sequence: Synthetic oligonucleotide
gggccctggcaactcagg

SEQ ID NO: 2770 - DNA, 18 bp, Artificial Sequence
  Description of Artificial Sequence: Synthetic oligonucleotide
acagagggccctggcaac

SEQ ID NO: 2771 - DNA, 18 bp, Artificial Sequence
  Description of Artificial Sequence: Synthetic oligonucleotide
gtgtcacagagggccctg

SEQ ID NO: 2772 - DNA, 18 bp, Artificial Sequence
  Description of Artificial Sequence: Synthetic oligonucleotide
cactggtgtcacagaggg

SEQ ID NO: 2773 - DNA, 18 bp, Artificial Sequence
  Description of Artificial Sequence: Synthetic oligonucleotide
tgtggcactggtgtcaca

SEQ ID NO: 2774 - DNA, 18 bp, Artificial Sequence
  Description of Artificial Sequence: Synthetic oligonucleotide
acaactgtggcactggtg

SEQ ID NO: 2775 - DNA, 18 bp, Artificial Sequence
  Description of Artificial Sequence: Synthetic oligonucleotide
ctgcgacaactgtggcac

SEQ ID NO: 2776 - DNA, 18 bp, Artificial Sequence
  Description of Artificial Sequence: Synthetic oligonucleotide
aattcctgcgacaactgt

SEQ ID NO: 2777 - DNA, 18 bp, Artificial Sequence
  Description of Artificial Sequence: Synthetic oligonucleotide
ctggcaattcctgcgaca

SEQ ID NO: 2778 - DNA, 18 bp, Artificial Sequence
  Description of Artificial Sequence: Synthetic oligonucleotide
aagccctggcaattcctg

SEQ ID NO: 2779 - DNA, 18 bp, Artificial Sequence
  Description of Artificial Sequence: Synthetic oligonucleotide
gctggaagccctggcaat

SEQ ID NO: 2780 - DNA, 18 bp, Artificial Sequence
  Description of Artificial Sequence: Synthetic oligonucleotide
atggtgctggaagccctg

SEQ ID NO: 2781 - DNA, 18 bp, Artificial Sequence
  Description of Artificial Sequence: Synthetic oligonucleotide
catggatggtgctggaag

SEQ ID NO: 2782 - DNA, 18 bp, Artificial Sequence
  Description of Artificial Sequence: Synthetic oligonucleotide
aaccccatggatggtgct

SEQ ID NO: 2783 - DNA, 18 bp, Artificial Sequence
  Description of Artificial Sequence: Synthetic oligonucleotide
gctccaaccccatggatg

SEQ ID NO: 2784 - DNA, 18 bp, Artificial Sequence
  Description of Artificial Sequence: Synthetic oligonucleotide
tggtggctccaaccccat

SEQ ID NO: 2785 - DNA, 18 bp, Artificial Sequence
  Description of Artificial Sequence: Synthetic oligonucleotide
tcctgtggtggctccaac

SEQ ID NO: 2786 - DNA, 18 bp, Artificial Sequence
  Description of Artificial Sequence: Synthetic oligonucleotide
gtacctcctgtggtggct

SEQ ID NO: 2787 - DNA, 18 bp, Artificial Sequence
  Description of Artificial Sequence: Synthetic oligonucleotide
ctctggtacctcctgtgg

SEQ ID NO: 2788 - DNA, 18 bp, Artificial Sequence
  Description of Artificial Sequence: Synthetic oligonucleotide
ggtggctctggtacctcc

SEQ ID NO: 2789 - DNA, 18 bp, Artificial Sequence
  Description of Artificial Sequence: Synthetic oligonucleotide
tcacaggtggctctggta

SEQ ID NO: 2790 - DNA, 18 bp, Artificial Sequence
  Description of Artificial Sequence: Synthetic oligonucleotide
tgccatcacaggtggctc

SEQ ID NO: 2791 - DNA, 18 bp, Artificial Sequence
  Description of Artificial Sequence: Synthetic oligonucleotide
tcctgtgccatcacaggt

SEQ ID NO: 2792 - DNA, 18 bp, Artificial Sequence
  Description of Artificial Sequence: Synthetic oligonucleotide
gcaactcctgtgccatca

SEQ ID NO: 2793 - DNA, 18 bp, Artificial Sequence
  Description of Artificial Sequence: Synthetic oligonucleotide
ccctggcaactcctgtgc

SEQ ID NO: 2794 - DNA, 18 bp, Artificial Sequence
  Description of Artificial Sequence: Synthetic oligonucleotide
ggcagccctggcaactcc

SEQ ID NO: 2795 - DNA, 18 bp, Artificial Sequence
  Description of Artificial Sequence: Synthetic oligonucleotide
ccaaaggcagccctggca

SEQ ID NO: 2796 - DNA, 18 bp, Artificial Sequence
  Description of Artificial Sequence: Synthetic oligonucleotide
tgtcaccaaaggcagccc

SEQ ID NO: 2797 - DNA, 18 bp, Artificial Sequence
  Description of Artificial Sequence: Synthetic oligonucleotide
gctgctgtcaccaaaggc

SEQ ID NO: 2798 - DNA, 18 bp, Artificial Sequence
  Description of Artificial Sequence: Synthetic oligonucleotide
ctactgctgctgtcacca

SEQ ID NO: 2799 - DNA, 18 bp, Artificial Sequence
  Description of Artificial Sequence: Synthetic oligonucleotide
caactctactgctgctgt

SEQ ID NO: 2800 - DNA, 18 bp, Artificial Sequence
  Description of Artificial Sequence: Synthetic oligonucleotide
tctggcaactctactgct

SEQ ID NO: 2801 - DNA, 18 bp, Artificial Sequence
  Description of Artificial Sequence: Synthetic oligonucleotide
gctgctctggcaactcta

SEQ ID NO: 2802 - DNA, 18 bp, Artificial Sequence
  Description of Artificial Sequence: Synthetic oligonucleotide
cgcaggctgctctggcaa

SEQ ID NO: 2803 - DNA, 18 bp, Artificial Sequence
  Description of Artificial Sequence: Synthetic oligonucleotide
gttaccgcaggctgctct

SEQ ID NO: 2804 - DNA, 18 bp, Artificial Sequence
  Description of Artificial Sequence: Synthetic oligonucleotide
ctactgttaccgcaggct

SEQ ID NO: 2805 - DNA, 18 bp, Artificial Sequence
  Description of Artificial Sequence: Synthetic oligonucleotide
cattgctactgttaccgc

SEQ ID NO: 2806 - DNA, 18 bp, Artificial Sequence
  Description of Artificial Sequence: Synthetic oligonucleotide
aactccattgctactgtt

SEQ ID NO: 2807 - DNA, 18 bp, Artificial Sequence
  Description of Artificial Sequence: Synthetic oligonucleotide
cggtcaactccattgcta

SEQ ID NO: 2808 - DNA, 18 bp, Artificial Sequence
  Description of Artificial Sequence: Synthetic oligonucleotide
ttgttcggtcaactccat

SEQ ID NO: 2809 - DNA, 18 bp, Artificial Sequence
  Description of Artificial Sequence: Synthetic oligonucleotide
acaggttgttcggtcaac

SEQ ID NO: 2810 - DNA, 18 bp, Artificial Sequence
  Description of Artificial Sequence: Synthetic oligonucleotide
tcgtcacaggttgttcgg

SEQ ID NO: 2811 - DNA, 18 bp, Artificial Sequence
  Description of Artificial Sequence: Synthetic oligonucleotide
tgtcgtcgtcacaggttg

SEQ ID NO: 2812 - DNA, 18 bp, Artificial Sequence
  Description of Artificial Sequence: Synthetic oligonucleotide
aactctgtcgtcgtcaca

SEQ ID NO: 2813 - DNA, 18 bp, Artificial Sequence
  Description of Artificial Sequence: Synthetic oligonucleotide
gctccaactctgtcgtcg

SEQ ID NO: 2814 - DNA, 18 bp, Artificial Sequence
  Description of Artificial Sequence: Synthetic oligonucleotide
aggctgctccaactctgt

SEQ ID NO: 2815 - DNA, 18 bp, Artificial Sequence
  Description of Artificial Sequence: Synthetic oligonucleotide
cccacaggctgctccaac

SEQ ID NO: 2816 - DNA, 18 bp, Artificial Sequence
  Description of Artificial Sequence: Synthetic oligonucleotide
tcatccccacaggctgct

SEQ ID NO: 2817 - DNA, 18 bp, Artificial Sequence
  Description of Artificial Sequence: Synthetic oligonucleotide
cgttgtcatccccacagg

SEQ ID NO: 2818 - DNA, 18 bp, Artificial Sequence
  Description of Artificial Sequence: Synthetic oligonucleotide
tccaccgttgtcatcccc

SEQ ID NO: 2819 - DNA, 18 bp, Artificial Sequence
  Description of Artificial Sequence: Synthetic oligonucleotide
gatgttccaccgttgtca

SEQ ID NO: 2820 - DNA, 18 bp, Artificial Sequence
  Description of Artificial Sequence: Synthetic oligonucleotide
cccaggatgttccaccgt

SEQ ID NO: 2821 - DNA, 18 bp, Artificial Sequence
  Description of Artificial Sequence: Synthetic oligonucleotide
ggatgcccaggatgttcc

SEQ ID NO: 2822 - DNA, 18 bp, Artificial Sequence
  Description of Artificial Sequence: Synthetic oligonucleotide
cctcaggatgcccaggat

SEQ ID NO: 2823 - DNA, 18 bp, Artificial Sequence
  Description of Artificial Sequence: Synthetic oligonucleotide
tgtcacctcaggatgccc

SEQ ID NO: 2824 - DNA, 18 bp, Artificial Sequence
  Description of Artificial Sequence: Synthetic oligonucleotide
gccgttgtcacctcagga

SEQ ID NO: 2825 - DNA, 18 bp, Artificial Sequence
  Description of Artificial Sequence: Synthetic oligonucleotide
ctgttgccgttgtcacct

SEQ ID NO: 2826 - DNA, 18 bp, Artificial Sequence
  Description of Artificial Sequence: Synthetic oligonucleotide
caaccctgttgccgttgt

SEQ ID NO: 2827 - DNA, 18 bp, Artificial Sequence
  Description of Artificial Sequence: Synthetic oligonucleotide
cccagcaaccctgttgcc

SEQ ID NO: 2828 - DNA, 18 bp, Artificial Sequence
  Description of Artificial Sequence: Synthetic oligonucleotide
gctgccccagcaaccctg

SEQ ID NO: 2829 - DNA, 18 bp, Artificial Sequence
  Description of Artificial Sequence: Synthetic oligonucleotide
ctcaggctgccccagcaa

SEQ ID NO: 2830 - DNA, 18 bp, Artificial Sequence
  Description of Artificial Sequence: Synthetic oligonucleotide
gttgcctcaggctgcccc

SEQ ID NO: 2831 - DNA, 18 bp, Artificial Sequence
  Description of Artificial Sequence: Synthetic oligonucleotide
ccatcgttgcctcaggct

SEQ ID NO: 2832 - DNA, 18 bp, Artificial Sequence
  Description of Artificial Sequence: Synthetic oligonucleotide
cagcaccatcgttgcctc

SEQ ID NO: 2833 - DNA, 18 bp, Artificial Sequence
  Description of Artificial Sequence: Synthetic oligonucleotide
aactccagcaccatcgtt

SEQ ID NO: 2834 - DNA, 18 bp, Artificial Sequence
  Description of Artificial Sequence: Synthetic oligonucleotide
ctggcaactccagcacca

SEQ ID NO: 2835 - DNA, 18 bp, Artificial Sequence
  Description of Artificial Sequence: Synthetic oligonucleotide
ctgtcctggcaactccag

SEQ ID NO: 2836 - DNA, 18 bp, Artificial Sequence
  Description of Artificial Sequence: Synthetic oligonucleotide
actggctgtcctggcaac

SEQ ID NO: 2837 - DNA, 18 bp, Artificial Sequence
  Description of Artificial Sequence: Synthetic oligonucleotide
ttgccactggctgtcctg

SEQ ID NO: 2838 - DNA, 18 bp, Artificial Sequence
  Description of Artificial Sequence: Synthetic oligonucleotide
tgtcgttgccactggctg

SEQ ID NO: 2839 - DNA, 18 bp, Artificial Sequence
  Description of Artificial Sequence: Synthetic oligonucleotide
agcgctgtcgttgccact

SEQ ID NO: 2840 - DNA, 18 bp, Artificial Sequence
  Description of Artificial Sequence: Synthetic oligonucleotide
actccagcgctgtcgttg

SEQ ID NO: 2841 - DNA, 18 bp, Artificial Sequence
  Description of Artificial Sequence: Synthetic oligonucleotide
cggcaactccagcgctgt

SEQ ID NO: 2842 - DNA, 18 bp, Artificial Sequence
  Description of Artificial Sequence: Synthetic oligonucleotide
tgccccggcaactccagc

SEQ ID NO: 2843 - DNA, 18 bp, Artificial Sequence
  Description of Artificial Sequence: Synthetic oligonucleotide
aaggctgccccggcaact

SEQ ID NO: 2844 - DNA, 18 bp, Artificial Sequence
  Description of Artificial Sequence: Synthetic oligonucleotide
caccgaaggctgccccgg

SEQ ID NO: 2845 - DNA, 18 bp, Artificial Sequence
  Description of Artificial Sequence: Synthetic oligonucleotide
ccagtcaccgaaggctgc

SEQ ID NO: 2846 - DNA, 18 bp, Artificial Sequence
  Description of Artificial Sequence: Synthetic oligonucleotide
gcaccccagtcaccgaag

SEQ ID NO: 2847 - DNA, 18 bp, Artificial Sequence
  Description of Artificial Sequence: Synthetic oligonucleotide
ctctggcaccccagtcac

SEQ ID NO: 2848 - DNA, 18 bp, Artificial Sequence
  Description of Artificial Sequence: Synthetic oligonucleotide
ggcaactctggcacccca

SEQ ID NO: 2849 - DNA, 18 bp, Artificial Sequence
  Description of Artificial Sequence: Synthetic oligonucleotide
gccctggcaactctggca

SEQ ID NO: 2850 - DNA, 18 bp, Artificial Sequence
  Description of Artificial Sequence: Synthetic oligonucleotide
aggcagccctggcaactc

SEQ ID NO: 2851 - DNA, 18 bp, Artificial Sequence
  Description of Artificial Sequence: Synthetic oligonucleotide
gccgaaggcagccctggc

SEQ ID NO: 2852 - DNA, 18 bp, Artificial Sequence
  Description of Artificial Sequence: Synthetic oligonucleotide
tagttgccgaaggcagcc

SEQ ID NO: 2853 - DNA, 18 bp, Artificial Sequence
  Description of Artificial Sequence: Synthetic oligonucleotide
tgccctagttgccgaagg

SEQ ID NO: 2854 - DNA, 18 bp, Artificial Sequence
  Description of Artificial Sequence: Synthetic oligonucleotide
tccagtgccctagttgcc

SEQ ID NO: 2855 - DNA, 18 bp, Artificial Sequence
  Description of Artificial Sequence: Synthetic oligonucleotide
acaactccagtgccctag

SEQ ID NO: 2856 - DNA, 18 bp, Artificial Sequence
  Description of Artificial Sequence: Synthetic oligonucleotide
ccccgacaactccagtgc

SEQ ID NO: 2857 - DNA, 18 bp, Artificial Sequence
  Description of Artificial Sequence: Synthetic oligonucleotide
ggctgccccgacaactcc

SEQ ID NO: 2858 - DNA, 18 bp, Artificial Sequence
  Description of Artificial Sequence: Synthetic oligonucleotide
ccacaggctgccccgaca

SEQ ID NO: 2859 - DNA, 18 bp, Artificial Sequence
  Description of Artificial Sequence: Synthetic oligonucleotide
agttgccacaggctgccc

SEQ ID NO: 2860 - DNA, 18 bp, Artificial Sequence
  Description of Artificial Sequence: Synthetic oligonucleotide
gccccagttgccacaggc

SEQ ID NO: 2861 - DNA, 18 bp, Artificial Sequence
  Description of Artificial Sequence: Synthetic oligonucleotide
ctagtgccccagttgcca

SEQ ID NO: 2862 - DNA, 18 bp, Artificial Sequence
  Description of Artificial Sequence: Synthetic oligonucleotide
caactctagtgccccagt

SEQ ID NO: 2863 - DNA, 18 bp, Artificial Sequence
  Description of Artificial Sequence: Synthetic oligonucleotide
ccaggcaactctagtgcc

SEQ ID NO: 2864 - DNA, 18 bp, Artificial Sequence
  Description of Artificial Sequence: Synthetic oligonucleotide
gcggcccaggcaactcta

SEQ ID NO: 2865 - DNA, 18 bp, Artificial Sequence
  Description of Artificial Sequence: Synthetic oligonucleotide
catgagcggcccaggcaa

SEQ ID NO: 2866 - DNA, 18 bp, Artificial Sequence
  Description of Artificial Sequence: Synthetic oligonucleotide
gctgccatgagcggccca

SEQ ID NO: 2867 - DNA, 18 bp, Artificial Sequence
  Description of Artificial Sequence: Synthetic oligonucleotide
ccccagctgccatgagcg

SEQ ID NO: 2868 - DNA, 18 bp, Artificial Sequence
  Description of Artificial Sequence: Synthetic oligonucleotide
cagtgccccagctgccat

SEQ ID NO: 2869 - DNA, 18 bp, Artificial Sequence
  Description of Artificial Sequence: Synthetic oligonucleotide
aactccagtgccccagct

SEQ ID NO: 2870 - DNA, 18 bp, Artificial Sequence
  Description of Artificial Sequence: Synthetic oligonucleotide
ccgagaactccagtgccc

SEQ ID NO: 2871 - DNA, 18 bp, Artificial Sequence
  Description of Artificial Sequence: Synthetic oligonucleotide
ctgccccgagaactccag

SEQ ID NO: 2872 - DNA, 18 bp, Artificial Sequence
  Description of Artificial Sequence: Synthetic oligonucleotide
ccagactgccccgagaac

SEQ ID NO: 2873 - DNA, 18 bp, Artificial Sequence
  Description of Artificial Sequence: Synthetic oligonucleotide
ctgccccagactgccccg

SEQ ID NO: 2874 - DNA, 18 bp, Artificial Sequence
  Description of Artificial Sequence: Synthetic oligonucleotide
tccagctgccccagactg

SEQ ID NO: 2875 - DNA, 18 bp, Artificial Sequence
  Description of Artificial Sequence: Synthetic oligonucleotide
agtgctccagctgcccca

SEQ ID NO: 2876 - DNA, 18 bp, Artificial Sequence
  Description of Artificial Sequence: Synthetic oligonucleotide
gctccagtgctccagctg

SEQ ID NO: 2877 - DNA, 18 bp, Artificial Sequence
  Description of Artificial Sequence: Synthetic oligonucleotide
caaaagctccagtgctcc

SEQ ID NO: 2878 - DNA, 18 bp, Artificial Sequence
  Description of Artificial Sequence: Synthetic oligonucleotide
tgccccaaaagctccagt

SEQ ID NO: 2879 - DNA, 18 bp, Artificial Sequence
  Description of Artificial Sequence: Synthetic oligonucleotide
gaggctgccccaaaagct

SEQ ID NO: 2880 - DNA, 18 bp, Artificial Sequence
  Description of Artificial Sequence: Synthetic oligonucleotide
tgccagaggctgccccaa

SEQ ID NO: 2881 - DNA, 18 bp, Artificial Sequence
  Description of Artificial Sequence: Synthetic oligonucleotide
cctgttgccagaggctgc

SEQ ID NO: 2882 - DNA, 18 bp, Artificial Sequence
  Description of Artificial Sequence: Synthetic oligonucleotide
gcacccctgttgccagag

SEQ ID NO: 2883 - DNA, 18 bp, Artificial Sequence
  Description of Artificial Sequence: Synthetic oligonucleotide
ctccagcacccctgttgc

SEQ ID NO: 2884 - DNA, 18 bp, Artificial Sequence
  Description of Artificial Sequence: Synthetic oligonucleotide
ggcaactccagcacccct

SEQ ID NO: 2885 - DNA, 18 bp, Artificial Sequence
  Description of Artificial Sequence: Synthetic oligonucleotide
gccctggcaactccagca

SEQ ID NO: 2886 - DNA, 18 bp, Artificial Sequence
  Description of Artificial Sequence: Synthetic oligonucleotide
aggctgccctggcaactc

SEQ ID NO: 2887 - DNA, 18 bp, Artificial Sequence
  Description of Artificial Sequence: Synthetic oligonucleotide
gccccaggctgccctggc

SEQ ID NO: 2888 - DNA, 18 bp, Artificial Sequence
  Description of Artificial Sequence: Synthetic oligonucleotide
ctggcgccccaggctgcc

SEQ ID NO: 2889 - DNA, 18 bp, Artificial Sequence
  Description of Artificial Sequence: Synthetic oligonucleotide
caactctggcgccccagg

SEQ ID NO: 2890 - DNA, 18 bp, Artificial Sequence
  Description of Artificial Sequence: Synthetic oligonucleotide
ccaggcaactctggcgcc

SEQ ID NO: 2891 - DNA, 18 bp, Artificial Sequence
  Description of Artificial Sequence: Synthetic oligonucleotide
gctgcccaggcaactctg

SEQ ID NO: 2892 - DNA, 18 bp, Artificial Sequence
  Description of Artificial Sequence: Synthetic oligonucleotide
cacaggctgcccaggcaa

SEQ ID NO: 2893 - DNA, 18 bp, Artificial Sequence
  Description of Artificial Sequence: Synthetic oligonucleotide
gttgccacaggctgccca

SEQ ID NO: 2894 - DNA, 18 bp, Artificial Sequence
  Description of Artificial Sequence: Synthetic oligonucleotide
ccacagttgccacaggct

SEQ ID NO: 2895 - DNA, 18 bp, Artificial Sequence
  Description of Artificial Sequence: Synthetic oligonucleotide
cagcgccacagttgccac

SEQ ID NO: 2896 - DNA, 18 bp, Artificial Sequence
  Description of Artificial Sequence: Synthetic oligonucleotide
atctccagcgccacagtt

SEQ ID NO: 2897 - DNA, 18 bp, Artificial Sequence
  Description of Artificial Sequence: Synthetic oligonucleotide
cagagatctccagcgcca

SEQ ID NO: 2898 - DNA, 18 bp, Artificial Sequence
  Description of Artificial Sequence: Synthetic oligonucleotide
ctgaacagagatctccag

SEQ ID NO: 2899 - DNA, 18 bp, Artificial Sequence
  Description of Artificial Sequence: Synthetic oligonucleotide
acagactgaacagagatc

SEQ ID NO: 2900 - DNA, 18 bp, Artificial Sequence
  Description of Artificial Sequence: Synthetic oligonucleotide
tcaccacagactgaacag

SEQ ID NO: 2901 - DNA, 18 bp, Artificial Sequence
  Description of Artificial Sequence: Synthetic oligonucleotide
tgttgtcaccacagactg

SEQ ID NO: 2902 - DNA, 18 bp, Artificial Sequence
  Description of Artificial Sequence: Synthetic oligonucleotide
tccgatgttgtcaccaca

SEQ ID NO: 2903 - DNA, 18 bp, Artificial Sequence
  Description of Artificial Sequence: Synthetic oligonucleotide
acagctccgatgttgtca

SEQ ID NO: 2904 - DNA, 18 bp, Artificial Sequence
  Description of Artificial Sequence: Synthetic oligonucleotide
cgttgacagctccgatgt

SEQ ID NO: 2905 - DNA, 18 bp, Artificial Sequence
  Description of Artificial Sequence: Synthetic oligonucleotide
gtcatcgttgacagctcc

SEQ ID NO: 2906 - DNA, 18 bp, Artificial Sequence
  Description of Artificial Sequence: Synthetic oligonucleotide
acacggtcatcgttgaca

SEQ ID NO: 2907 - DNA, 18 bp, Artificial Sequence
  Description of Artificial Sequence: Synthetic oligonucleotide
ctgcgacacggtcatcgt

SEQ ID NO: 2908 - DNA, 18 bp, Artificial Sequence
  Description of Artificial Sequence: Synthetic oligonucleotide
agggactgcgacacggtc

SEQ ID NO: 2909 - DNA, 18 bp, Artificial Sequence
  Description of Artificial Sequence: Synthetic oligonucleotide
cctccagggactgcgaca

SEQ ID NO: 2910 - DNA, 18 bp, Artificial Sequence
  Description of Artificial Sequence: Synthetic oligonucleotide
gggcacctccagggactg

SEQ ID NO: 2911 - DNA, 18 bp, Artificial Sequence
  Description of Artificial Sequence: Synthetic oligonucleotide
gtcgagggcacctccagg

SEQ ID NO: 2912 - DNA, 18 bp, Artificial Sequence
  Description of Artificial Sequence: Synthetic oligonucleotide
ctgtcgtcgagggcacct

SEQ ID NO: 2913 - DNA, 18 bp, Artificial Sequence
  Description of Artificial Sequence: Synthetic oligonucleotide
cagcgctgtcgtcgaggg

SEQ ID NO: 2914 - DNA, 18 bp, Artificial Sequence
  Description of Artificial Sequence: Synthetic oligonucleotide
gattccagcgctgtcgtc

SEQ ID NO: 2915 - DNA, 18 bp, Artificial Sequence
  Description of Artificial Sequence: Synthetic oligonucleotide
tataggattccagcgctg

SEQ ID NO: 2916 - DNA, 18 bp, Artificial Sequence
  Description of Artificial Sequence: Synthetic oligonucleotide
cgtattataggattccag

SEQ ID NO: 2917 - DNA, 18 bp, Artificial Sequence
  Description of Artificial Sequence: Synthetic oligonucleotide
gctaccgtattataggat

SEQ ID NO: 2918 - DNA, 18 bp, Artificial Sequence
  Description of Artificial Sequence: Synthetic oligonucleotide
cctgtgctaccgtattat

SEQ ID NO: 2919 - DNA, 18 bp, Artificial Sequence
  Description of Artificial Sequence: Synthetic oligonucleotide
cagctcctgtgctaccgt

SEQ ID NO: 2920 - DNA, 18 bp, Artificial Sequence
  Description of Artificial Sequence: Synthetic oligonucleotide
aggcagctcctgtgctac

SEQ ID NO: 2921 - DNA, 18 bp, Artificial Sequence
  Description of Artificial Sequence: Synthetic oligonucleotide
gtagtaggcagctcctgt

SEQ ID NO: 2922 - DNA, 18 bp, Artificial Sequence
  Description of Artificial Sequence: Synthetic oligonucleotide
ctaatgtagtaggcagct

SEQ ID NO: 2923 - DNA, 18 bp, Artificial Sequence
  Description of Artificial Sequence: Synthetic oligonucleotide
ccccactaatgtagtagg

SEQ ID NO: 2924 - DNA, 18 bp, Artificial Sequence
  Description of Artificial Sequence: Synthetic oligonucleotide
gtctcccccactaatgta

SEQ ID NO: 2925 - DNA, 18 bp, Artificial Sequence
  Description of Artificial Sequence: Synthetic oligonucleotide
cagaagtctcccccacta

SEQ ID NO: 2926 - DNA, 18 bp, Artificial Sequence
  Description of Artificial Sequence: Synthetic oligonucleotide
tgttacagaagtctcccc

SEQ ID NO: 2927 - DNA, 18 bp, Artificial Sequence
  Description of Artificial Sequence: Synthetic oligonucleotide
cctactgttacagaagtc

SEQ ID NO: 2928 - DNA, 18 bp, Artificial Sequence
  Description of Artificial Sequence: Synthetic oligonucleotide
ccactcctactgttacag

SEQ ID NO: 2929 - DNA, 18 bp, Artificial Sequence
  Description of Artificial Sequence: Synthetic oligonucleotide
gggatccactcctactgt

SEQ ID NO: 2930 - DNA, 18 bp, Artificial Sequence
  Description of Artificial Sequence: Synthetic oligonucleotide
atcaagggatccactcct

SEQ ID NO: 2931 - DNA, 18 bp, Artificial Sequence
  Description of Artificial Sequence: Synthetic oligonucleotide
gggccatcaagggatcca

SEQ ID NO: 2932 - DNA, 18 bp, Artificial Sequence
  Description of Artificial Sequence: Synthetic oligonucleotide
ttctggggccatcaaggg

SEQ ID NO: 2933 - DNA, 18 bp, Artificial Sequence
  Description of Artificial Sequence: Synthetic oligonucleotide
tgggattctggggccatc

SEQ ID NO: 2934 - DNA, 18 bp, Artificial Sequence
  Description of Artificial Sequence: Synthetic oligonucleotide
atatatgggattctgggg

SEQ ID NO: 2935 - DNA, 18 bp, Artificial Sequence
  Description of Artificial Sequence: Synthetic oligonucleotide
agctaatatatgggattc

SEQ ID NO: 2936 - DNA, 18 bp, Artificial Sequence
  Description of Artificial Sequence: Synthetic oligonucleotide
ttagaagctaatatatgg

SEQ ID NO: 2937 - DNA, 18 bp, Artificial Sequence
  Description of Artificial Sequence: Synthetic oligonucleotide
tggtgttagaagctaata

SEQ ID NO: 2938 - DNA, 18 bp, Artificial Sequence
  Description of Artificial Sequence: Synthetic oligonucleotide
ctccatggtgttagaagc

SEQ ID NO: 2939 - DNA, 18 bp, Artificial Sequence
  Description of Artificial Sequence: Synthetic oligonucleotide
tgggtctccatggtgtta

SEQ ID NO: 2940 - DNA, 18 bp, Artificial Sequence
  Description of Artificial Sequence: Synthetic oligonucleotide
atatatgggtctccatgg

SEQ ID NO: 2941 - DNA, 18 bp, Artificial Sequence
  Description of Artificial Sequence: Synthetic oligonucleotide
tgctaatatatgggtctc

SEQ ID NO: 2942 - DNA, 18 bp, Artificial Sequence
  Description of Artificial Sequence: Synthetic oligonucleotide
ttggatgctaatatatgg

SEQ ID NO: 2943 - DNA, 18 bp, Artificial Sequence
  Description of Artificial Sequence: Synthetic oligonucleotide
tggtgttggatgctaata

SEQ ID NO: 2944 - DNA, 18 bp, Artificial Sequence
  Description of Artificial Sequence: Synthetic oligonucleotide
gtccatggtgttggatgc

SEQ ID NO: 2945 - DNA, 18 bp, Artificial Sequence
  Description of Artificial Sequence: Synthetic oligonucleotide
tgggagtccatggtgttg

SEQ ID NO: 2946 - DNA, 18 bp, Artificial Sequence
  Description of Artificial Sequence: Synthetic oligonucleotide
gcatttgggagtccatgg

SEQ ID NO: 2947 - DNA, 18 bp, Artificial Sequence
  Description of Artificial Sequence: Synthetic oligonucleotide
cgctagcatttgggagtc

SEQ ID NO: 2948 - DNA, 18 bp, Artificial Sequence
  Description of Artificial Sequence: Synthetic oligonucleotide
ttggacgctagcatttgg

SEQ ID NO: 2949 - DNA, 18 bp, Artificial Sequence
  Description of Artificial Sequence: Synthetic oligonucleotide
tggtgttggacgctagca

SEQ ID NO: 2950 - DNA, 18 bp, Artificial Sequence
  Description of Artificial Sequence: Synthetic oligonucleotide
gtccatggtgttggacgc

SEQ ID NO: 2951 - DNA, 18 bp, Artificial Sequence
  Description of Artificial Sequence: Synthetic oligonucleotide
tgggagtccatggtgttg

SEQ ID NO: 2952 - DNA, 18 bp, Artificial Sequence
  Description of Artificial Sequence: Synthetic oligonucleotide
gcatctgggagtccatgg

SEQ ID NO: 2953 - DNA, 18 bp, Artificial Sequence
  Description of Artificial Sequence: Synthetic oligonucleotide
tgctagcatctgggagtc

SEQ ID NO: 2954 - DNA, 18 bp, Artificial Sequence
  Description of Artificial Sequence: Synthetic oligonucleotide
ttggatgctagcatctgg

SEQ ID NO: 2955 - DNA, 18 bp, Artificial Sequence
  Description of Artificial Sequence: Synthetic oligonucleotide
tggtgttggatgctagca

SEQ ID NO: 2956 - DNA, 18 bp, Artificial Sequence
  Description of Artificial Sequence: Synthetic oligonucleotide
gtccatggtgttggatgc

SEQ ID NO: 2957 - DNA, 18 bp, Artificial Sequence
  Description of Artificial Sequence: Synthetic oligonucleotide
tgggagtccatggtgttg

SEQ ID NO: 2958 - DNA, 18 bp, Artificial Sequence
  Description of Artificial Sequence: Synthetic oligonucleotide
acatctgggagtccatgg

SEQ ID NO: 2959 - DNA, 18 bp, Artificial Sequence
  Description of Artificial Sequence: Synthetic oligonucleotide
cgctaacatctgggagtc

SEQ ID NO: 2960 - DNA, 18 bp, Artificial Sequence
  Description of Artificial Sequence: Synthetic oligonucleotide
ctagacgctaacatctgg

SEQ ID NO: 2961 - DNA, 18 bp, Artificial Sequence
  Description of Artificial Sequence: Synthetic oligonucleotide
tggtgctagacgctaaca

SEQ ID NO: 2962 - DNA, 18 bp, Artificial Sequence
  Description of Artificial Sequence: Synthetic oligonucleotide
gtccatggtgctagacgc

SEQ ID NO: 2963 - DNA, 18 bp, Artificial Sequence
  Description of Artificial Sequence: Synthetic oligonucleotide
tgggagtccatggtgcta

SEQ ID NO: 2964 - DNA, 18 bp, Artificial Sequence
  Description of Artificial Sequence: Synthetic oligonucleotide
acatctgggagtccatgg

SEQ ID NO: 2965 - DNA, 18 bp, Artificial Sequence
  Description of Artificial Sequence: Synthetic oligonucleotide
tgctaacatctgggagtc

SEQ ID NO: 2966 - DNA, 18 bp, Artificial Sequence
  Description of Artificial Sequence: Synthetic oligonucleotide
ctagttgctaacatctgg

SEQ ID NO: 2967 - DNA, 18 bp, Artificial Sequence
  Description of Artificial Sequence: Synthetic oligonucleotide
tggagctagttgctaaca

SEQ ID NO: 2968 - DNA, 18 bp, Artificial Sequence
  Description of Artificial Sequence: Synthetic oligonucleotide
gtccatggagctagttgc

SEQ ID NO: 2969 - DNA, 18 bp, Artificial Sequence
  Description of Artificial Sequence: Synthetic oligonucleotide
tgggagtccatggagcta

SEQ ID NO: 2970 - DNA, 18 bp, Artificial Sequence
  Description of Artificial Sequence: Synthetic oligonucleotide
acatctgggagtccatgg

SEQ ID NO: 2971 - DNA, 18 bp, Artificial Sequence
  Description of Artificial Sequence: Synthetic oligonucleotide
tgctaacatctgggagtc

SEQ ID NO: 2972 - DNA, 18 bp, Artificial Sequence
  Description of Artificial Sequence: Synthetic oligonucleotide
ctagttgctaacatctgg

SEQ ID NO: 2973 - DNA, 18 bp, Artificial Sequence
  Description of Artificial Sequence: Synthetic oligonucleotide
tggagctagttgctaaca

SEQ ID NO: 2974 - DNA, 18 bp, Artificial Sequence
  Description of Artificial Sequence: Synthetic oligonucleotide
gtccatggagctagttgc

SEQ ID NO: 2975 - DNA, 18 bp, Artificial Sequence
  Description of Artificial Sequence: Synthetic oligonucleotide
tgggagtccatggagcta

SEQ ID NO: 2976 - DNA, 18 bp, Artificial Sequence
  Description of Artificial Sequence: Synthetic oligonucleotide
acatctgggagtccatgg

SEQ ID NO: 2977 - DNA, 18 bp, Artificial Sequence
  Description of Artificial Sequence: Synthetic oligonucleotide
tgctaacatctgggagtc

SEQ ID NO: 2978 - DNA, 18 bp, Artificial Sequence
  Description of Artificial Sequence: Synthetic oligonucleotide
ctagttgctaacatctgg

SEQ ID NO: 2979 - DNA, 18 bp, Artificial Sequence
  Description of Artificial Sequence: Synthetic oligonucleotide
tagtgctagttgctaaca

SEQ ID NO: 2980 - DNA, 18 bp, Artificial Sequence
  Description of Artificial Sequence: Synthetic oligonucleotide
gtccatagtgctagttgc

SEQ ID NO: 2981 - DNA, 18 bp, Artificial Sequence
  Description of Artificial Sequence: Synthetic oligonucleotide
tgggagtccatagtgcta

SEQ ID NO: 2982 - DNA, 18 bp, Artificial Sequence
  Description of Artificial Sequence: Synthetic oligonucleotide
acatctgggagtccatag

SEQ ID NO: 2983 - DNA, 18 bp, Artificial Sequence
  Description of Artificial Sequence: Synthetic oligonucleotide
tgctaacatctgggagtc

SEQ ID NO: 2984 - DNA, 18 bp, Artificial Sequence
  Description of Artificial Sequence: Synthetic oligonucleotide
ctggttgctaacatctgg

SEQ ID NO: 2985 - DNA, 18 bp, Artificial Sequence
  Description of Artificial Sequence: Synthetic oligonucleotide
tggaactggttgctaaca

SEQ ID NO: 2986 - DNA, 18 bp, Artificial Sequence
  Description of Artificial Sequence: Synthetic oligonucleotide
gtccatggaactggttgc

SEQ ID NO: 2987 - DNA, 18 bp, Artificial Sequence
  Description of Artificial Sequence: Synthetic oligonucleotide
tgggagtccatggaactg

SEQ ID NO: 2988 - DNA, 18 bp, Artificial Sequence
  Description of Artificial Sequence: Synthetic oligonucleotide
acatctgggagtccatgg

SEQ ID NO: 2989 - DNA, 18 bp, Artificial Sequence
  Description of Artificial Sequence: Synthetic oligonucleotide
tgctaacatctgggagtc

SEQ ID NO: 2990 - DNA, 18 bp, Artificial Sequence
  Description of Artificial Sequence: Synthetic oligonucleotide
ctggttgctaacatctgg

SEQ ID NO: 2991 - DNA, 18 bp, Artificial Sequence
  Description of Artificial Sequence: Synthetic oligonucleotide
tggagctggttgctaaca

SEQ ID NO: 2992 - DNA, 18 bp, Artificial Sequence
  Description of Artificial Sequence: Synthetic oligonucleotide
gtccatggagctggttgc

SEQ ID NO: 2993 - DNA, 18 bp, Artificial Sequence
  Description of Artificial Sequence: Synthetic oligonucleotide
tgggagtccatggagctg

SEQ ID NO: 2994 - DNA, 18 bp, Artificial Sequence
  Description of Artificial Sequence: Synthetic oligonucleotide
acatctgggagtccatgg

SEQ ID NO: 2995 - DNA, 18 bp, Artificial Sequence
  Description of Artificial Sequence: Synthetic oligonucleotide
tgctaacatctgggagtc

SEQ ID NO: 2996 - DNA, 18 bp, Artificial Sequence
  Description of Artificial Sequence: Synthetic oligonucleotide
ctggttgctaacatctgg

SEQ ID NO: 2997 - DNA, 18 bp, Artificial Sequence
  Description of Artificial Sequence: Synthetic oligonucleotide
tggagctggttgctaaca

SEQ ID NO: 2998 - DNA, 18 bp, Artificial Sequence
  Description of Artificial Sequence: Synthetic oligonucleotide
gtccatggagctggttgc

SEQ ID NO: 2999 - DNA, 18 bp, Artificial Sequence
  Description of Artificial Sequence: Synthetic oligonucleotide
tgggagtccatggagctg

SEQ ID NO: 3000 - DNA, 18 bp, Artificial Sequence
  Description of Artificial Sequence: Synthetic oligonucleotide
acatctgggagtccatgg

SEQ ID NO: 3001 - DNA, 18 bp, Artificial Sequence
  Description of Artificial Sequence: Synthetic oligonucleotide
tgctaacatctgggagtc

SEQ ID NO: 3002 - DNA, 18 bp, Artificial Sequence
  Description of Artificial Sequence: Synthetic oligonucleotide
ctggttgctaacatctgg

SEQ ID NO: 3003 - DNA, 18 bp, Artificial Sequence
  Description of Artificial Sequence: Synthetic oligonucleotide
tggagctggttgctaaca

SEQ ID NO: 3004 - DNA, 18 bp, Artificial Sequence
  Description of Artificial Sequence: Synthetic oligonucleotide
gtccatggagctggttgc

SEQ ID NO: 3005 - DNA, 18 bp, Artificial Sequence
  Description of Artificial Sequence: Synthetic oligonucleotide
tgggagtccatggagctg

SEQ ID NO: 3006 - DNA, 18 bp, Artificial Sequence
  Description of Artificial Sequence: Synthetic oligonucleotide
acatctgggagtccatgg

SEQ ID NO: 3007 - DNA, 18 bp, Artificial Sequence
  Description of Artificial Sequence: Synthetic oligonucleotide
tgctaacatctgggagtc

SEQ ID NO: 3008 - DNA, 18 bp, Artificial Sequence
  Description of Artificial Sequence: Synthetic oligonucleotide
ctggttgctaacatctgg

SEQ ID NO: 3009 - DNA, 18 bp, Artificial Sequence
  Description of Artificial Sequence: Synthetic oligonucleotide
tggtgctggttgctaaca

SEQ ID NO: 3010 - DNA, 18 bp, Artificial Sequence
  Description of Artificial Sequence: Synthetic oligonucleotide
atccatggtgctggttgc

SEQ ID NO: 3011 - DNA, 18 bp, Artificial Sequence
  Description of Artificial Sequence: Synthetic oligonucleotide
tgagaatccatggtgctg

SEQ ID NO: 3012 - DNA, 18 bp, Artificial Sequence
  Description of Artificial Sequence: Synthetic oligonucleotide
acatctgagaatccatgg

SEQ ID NO: 3013 - DNA, 18 bp, Artificial Sequence
  Description of Artificial Sequence: Synthetic oligonucleotide
tgctaacatctgagaatc

SEQ ID NO: 3014 - DNA, 18 bp, Artificial Sequence
  Description of Artificial Sequence: Synthetic oligonucleotide
ctggttgctaacatctga

SEQ ID NO: 3015 - DNA, 18 bp, Artificial Sequence
  Description of Artificial Sequence: Synthetic oligonucleotide
tggtgctggttgctaaca

SEQ ID NO: 3016 - DNA, 18 bp, Artificial Sequence
  Description of Artificial Sequence: Synthetic oligonucleotide
gtccatggtgctggttgc

SEQ ID NO: 3017 - DNA, 18 bp, Artificial Sequence
  Description of Artificial Sequence: Synthetic oligonucleotide
tgggagtccatggtgctg

SEQ ID NO: 3018 - DNA, 18 bp, Artificial Sequence
  Description of Artificial Sequence: Synthetic oligonucleotide
acatctgggagtccatgg

SEQ ID NO: 3019 - DNA, 18 bp, Artificial Sequence
  Description of Artificial Sequence: Synthetic oligonucleotide
tgctaacatctgggagtc

SEQ ID NO: 3020 - DNA, 18 bp, Artificial Sequence
  Description of Artificial Sequence: Synthetic oligonucleotide
ctagttgctaacatctgg

SEQ ID NO: 3021 - DNA, 18 bp, Artificial Sequence
  Description of Artificial Sequence: Synthetic oligonucleotide
ttgagctagttgctaaca

SEQ ID NO: 3022 - DNA, 18 bp, Artificial Sequence
  Description of Artificial Sequence: Synthetic oligonucleotide
atccattgagctagttgc

SEQ ID NO: 3023 - DNA, 18 bp, Artificial Sequence
  Description of Artificial Sequence: Synthetic oligonucleotide
tgggaatccattgagcta

SEQ ID NO: 3024 - DNA, 18 bp, Artificial Sequence
  Description of Artificial Sequence: Synthetic oligonucleotide
acatctgggaatccattg

SEQ ID NO: 3025 - DNA, 18 bp, Artificial Sequence
  Description of Artificial Sequence: Synthetic oligonucleotide
tgctaacatctgggaatc

SEQ ID NO: 3026 - DNA, 18 bp, Artificial Sequence
  Description of Artificial Sequence: Synthetic oligonucleotide
ccagatgctaacatctgg

SEQ ID NO: 3027 - DNA, 18 bp, Artificial Sequence
  Description of Artificial Sequence: Synthetic oligonucleotide
tagtgccagatgctaaca

SEQ ID NO: 3028 - DNA, 18 bp, Artificial Sequence
  Description of Artificial Sequence: Synthetic oligonucleotide
gtccatagtgccagatgc

SEQ ID NO: 3029 - DNA, 18 bp, Artificial Sequence
  Description of Artificial Sequence: Synthetic oligonucleotide
tgagagtccatagtgcca

SEQ ID NO: 3030 - DNA, 18 bp, Artificial Sequence
  Description of Artificial Sequence: Synthetic oligonucleotide
acatttgagagtccatag

SEQ ID NO: 3031 - DNA, 18 bp, Artificial Sequence
  Description of Artificial Sequence: Synthetic oligonucleotide
agctaacatttgagagtc

SEQ ID NO: 3032 - DNA, 18 bp, Artificial Sequence
  Description of Artificial Sequence: Synthetic oligonucleotide
ccagaagctaacatttga

SEQ ID NO: 3033 - DNA, 18 bp, Artificial Sequence
  Description of Artificial Sequence: Synthetic oligonucleotide
tggtgccagaagctaaca

SEQ ID NO: 3034 - DNA, 18 bp, Artificial Sequence
  Description of Artificial Sequence: Synthetic oligonucleotide
atccatggtgccagaagc

SEQ ID NO: 3035 - DNA, 18 bp, Artificial Sequence
  Description of Artificial Sequence: Synthetic oligonucleotide
tgagcatccatggtgcca

SEQ ID NO: 3036 - DNA, 18 bp, Artificial Sequence
  Description of Artificial Sequence: Synthetic oligonucleotide
acatctgagcatccatgg

SEQ ID NO: 3037 - DNA, 18 bp, Artificial Sequence
  Description of Artificial Sequence: Synthetic oligonucleotide
cgctaacatctgagcatc

SEQ ID NO: 3038 - DNA, 18 bp, Artificial Sequence
  Description of Artificial Sequence: Synthetic oligonucleotide
ccagacgctaacatctga

SEQ ID NO: 3039 - DNA, 18 bp, Artificial Sequence
  Description of Artificial Sequence: Synthetic oligonucleotide
tggtaccagacgctaaca

SEQ ID NO: 3040 - DNA, 18 bp, Artificial Sequence
  Description of Artificial Sequence: Synthetic oligonucleotide
atccatggtaccagacgc

SEQ ID NO: 3041 - DNA, 18 bp, Artificial Sequence
  Description of Artificial Sequence: Synthetic oligonucleotide
tgggcatccatggtacca

SEQ ID NO: 3042 - DNA, 18 bp, Artificial Sequence
  Description of Artificial Sequence: Synthetic oligonucleotide
acatctgggcatccatgg

SEQ ID NO: 3043 - DNA, 18 bp, Artificial Sequence
  Description of Artificial Sequence: Synthetic oligonucleotide
cgctaacatctgggcatc

SEQ ID NO: 3044 - DNA, 18 bp, Artificial Sequence
  Description of Artificial Sequence: Synthetic oligonucleotide
ctagacgctaacatctgg

SEQ ID NO: 3045 - DNA, 18 bp, Artificial Sequence
  Description of Artificial Sequence: Synthetic oligonucleotide
gggtactagacgctaaca

SEQ ID NO: 3046 - DNA, 18 bp, Artificial Sequence
  Description of Artificial Sequence: Synthetic oligonucleotide
atcttgggtactagacgc

SEQ ID NO: 3047 - DNA, 18 bp, Artificial Sequence
  Description of Artificial Sequence: Synthetic oligonucleotide
tagcagaatcttgggtac

SEQ ID NO: 3048 - DNA, 18 bp, Artificial Sequence
  Description of Artificial Sequence: Synthetic oligonucleotide
caacatagcagaatcttg

SEQ ID NO: 3049 - DNA, 18 bp, Artificial Sequence
  Description of Artificial Sequence: Synthetic oligonucleotide
gaacccaacatagcagaa

SEQ ID NO: 3050 - DNA, 18 bp, Artificial Sequence
  Description of Artificial Sequence: Synthetic oligonucleotide
attttgaacccaacatag

SEQ ID NO: 3051 - DNA, 18 bp, Artificial Sequence
  Description of Artificial Sequence: Synthetic oligonucleotide
aggagattttgaacccaa

SEQ ID NO: 3052 - DNA, 18 bp, Artificial Sequence
  Description of Artificial Sequence: Synthetic oligonucleotide
ggatcaggagattttgaa

SEQ ID NO: 3053 - DNA, 18 bp, Artificial Sequence
  Description of Artificial Sequence: Synthetic oligonucleotide
tatagggatcaggagatt

SEQ ID NO: 3054 - DNA, 18 bp, Artificial Sequence
  Description of Artificial Sequence: Synthetic oligonucleotide
taacctatagggatcagg

SEQ ID NO: 3055 - DNA, 18 bp, Artificial Sequence
  Description of Artificial Sequence: Synthetic oligonucleotide
tgagctaacctataggga

SEQ ID NO: 3056 - DNA, 18 bp, Artificial Sequence
  Description of Artificial Sequence: Synthetic oligonucleotide
gatcctgagctaacctat

SEQ ID NO: 3057 - DNA, 18 bp, Artificial Sequence
  Description of Artificial Sequence: Synthetic oligonucleotide
gtaaggatcctgagctaa

SEQ ID NO: 3058 - DNA, 18 bp, Artificial Sequence
  Description of Artificial Sequence: Synthetic oligonucleotide
aacctgtaaggatcctga

SEQ ID NO: 3059 - DNA, 18 bp, Artificial Sequence
  Description of Artificial Sequence: Synthetic oligonucleotide
gagctaacctgtaaggat

SEQ ID NO: 3060 - DNA, 18 bp, Artificial Sequence
  Description of Artificial Sequence: Synthetic oligonucleotide
atcctgagctaacctgta

SEQ ID NO: 3061 - DNA, 18 bp, Artificial Sequence
  Description of Artificial Sequence: Synthetic oligonucleotide
tagggatcctgagctaac

SEQ ID NO: 3062 - DNA, 18 bp, Artificial Sequence
  Description of Artificial Sequence: Synthetic oligonucleotide
acctatagggatcctgag

SEQ ID NO: 3063 - DNA, 18 bp, Artificial Sequence
  Description of Artificial Sequence: Synthetic oligonucleotide
gcccaacctatagggatc

SEQ ID NO: 3064 - DNA, 18 bp, Artificial Sequence
  Description of Artificial Sequence: Synthetic oligonucleotide
tcatggcccaacctatag

SEQ ID NO: 3065 - DNA, 18 bp, Artificial Sequence
  Description of Artificial Sequence: Synthetic oligonucleotide
aggggtcatggcccaacc

SEQ ID NO: 3066 - DNA, 18 bp, Artificial Sequence
  Description of Artificial Sequence: Synthetic oligonucleotide
tctataggggtcatggcc

SEQ ID NO: 3067 - DNA, 18 bp, Artificial Sequence
  Description of Artificial Sequence: Synthetic oligonucleotide
cctaatctataggggtca

SEQ ID NO: 3068 - DNA, 18 bp, Artificial Sequence
  Description of Artificial Sequence: Synthetic oligonucleotide
catgacctaatctatagg

SEQ ID NO: 3069 - DNA, 18 bp, Artificial Sequence
  Description of Artificial Sequence: Synthetic oligonucleotide
agcatcatgacctaatct

SEQ ID NO: 3070 - DNA, 18 bp, Artificial Sequence
  Description of Artificial Sequence: Synthetic oligonucleotide
ctgtaagcatcatgacct

SEQ ID NO: 3071 - DNA, 18 bp, Artificial Sequence
  Description of Artificial Sequence: Synthetic oligonucleotide
ctaacctgtaagcatcat

SEQ ID NO: 3072 - DNA, 18 bp, Artificial Sequence
  Description of Artificial Sequence: Synthetic oligonucleotide
ttgtcctaacctgtaagc

SEQ ID NO: 3073 - DNA, 18 bp, Artificial Sequence
  Description of Artificial Sequence: Synthetic oligonucleotide
gggtcttgtcctaacctg

SEQ ID NO: 3074 - DNA, 18 bp, Artificial Sequence
  Description of Artificial Sequence: Synthetic oligonucleotide
tataagggtcttgtccta

SEQ ID NO: 3075 - DNA, 18 bp, Artificial Sequence
  Description of Artificial Sequence: Synthetic oligonucleotide
taatctataagggtcttg

SEQ ID NO: 3076 - DNA, 18 bp, Artificial Sequence
  Description of Artificial Sequence: Synthetic oligonucleotide
tggcctaatctataaggg

SEQ ID NO: 3077 - DNA, 18 bp, Artificial Sequence
  Description of Artificial Sequence: Synthetic oligonucleotide
gatcatggcctaatctat

SEQ ID NO: 3078 - DNA, 18 bp, Artificial Sequence
  Description of Artificial Sequence: Synthetic oligonucleotide
gtagggatcatggcctaa

SEQ ID NO: 3079 - DNA, 18 bp, Artificial Sequence
  Description of Artificial Sequence: Synthetic oligonucleotide
agtctgtagggatcatgg

SEQ ID NO: 3080 - DNA, 18 bp, Artificial Sequence
  Description of Artificial Sequence: Synthetic oligonucleotide
gagttagtctgtagggat

SEQ ID NO: 3081 - DNA, 18 bp, Artificial Sequence
  Description of Artificial Sequence: Synthetic oligonucleotide
atcaggagttagtctgta

SEQ ID NO: 3082 - DNA, 18 bp, Artificial Sequence
  Description of Artificial Sequence: Synthetic oligonucleotide
tagggatcaggagttagt

SEQ ID NO: 3083 - DNA, 18 bp, Artificial Sequence
  Description of Artificial Sequence: Synthetic oligonucleotide
tcctatagggatcaggag

SEQ ID NO: 3084 - DNA, 18 bp, Artificial Sequence
  Description of Artificial Sequence: Synthetic oligonucleotide
tgacatcctatagggatc

SEQ ID NO: 3085 - DNA, 18 bp, Artificial Sequence
  Description of Artificial Sequence: Synthetic oligonucleotide
ctaggtgacatcctatag

SEQ ID NO: 3086 - DNA, 18 bp, Artificial Sequence
  Description of Artificial Sequence: Synthetic oligonucleotide
agggtctaggtgacatcc

SEQ ID NO: 3087 - DNA, 18 bp, Artificial Sequence
  Description of Artificial Sequence: Synthetic oligonucleotide
cctgtagggtctaggtga

SEQ ID NO: 3088 - DNA, 18 bp, Artificial Sequence
  Description of Artificial Sequence: Synthetic oligonucleotide
gctatcctgtagggtcta

SEQ ID NO: 3089 - DNA, 18 bp, Artificial Sequence
  Description of Artificial Sequence: Synthetic oligonucleotide
tgggtgctatcctgtagg

SEQ ID NO: 3090 - DNA, 18 bp, Artificial Sequence
  Description of Artificial Sequence: Synthetic oligonucleotide
ggacctgggtgctatcct

SEQ ID NO: 3091 - DNA, 18 bp, Artificial Sequence
  Description of Artificial Sequence: Synthetic oligonucleotide
ctataggacctgggtgct

SEQ ID NO: 3092 - DNA, 18 bp, Artificial Sequence
  Description of Artificial Sequence: Synthetic oligonucleotide
ctattctataggacctgg

SEQ ID NO: 3093 - DNA, 18 bp, Artificial Sequence
  Description of Artificial Sequence: Synthetic oligonucleotide
gggtgctattctatagga

SEQ ID NO: 3094 - DNA, 18 bp, Artificial Sequence
  Description of Artificial Sequence: Synthetic oligonucleotide
ggcctgggtgctattcta

SEQ ID NO: 3095 - DNA, 18 bp, Artificial Sequence
  Description of Artificial Sequence: Synthetic oligonucleotide
tatatggcctgggtgcta

SEQ ID NO: 3096 - DNA, 18 bp, Artificial Sequence
  Description of Artificial Sequence: Synthetic oligonucleotide
taacctatatggcctggg

SEQ ID NO: 3097 - DNA, 18 bp, Artificial Sequence
  Description of Artificial Sequence: Synthetic oligonucleotide
ggtgctaacctatatggc

SEQ ID NO: 3098 - DNA, 18 bp, Artificial Sequence
  Description of Artificial Sequence: Synthetic oligonucleotide
gtctaggtgctaacctat

SEQ ID NO: 3099 - DNA, 18 bp, Artificial Sequence
  Description of Artificial Sequence: Synthetic oligonucleotide
caggggtctaggtgctaa

SEQ ID NO: 3100 - DNA, 18 bp, Artificial Sequence
  Description of Artificial Sequence: Synthetic oligonucleotide
aacatcaggggtctaggt

SEQ ID NO: 3101 - DNA, 18 bp, Artificial Sequence
  Description of Artificial Sequence: Synthetic oligonucleotide
atgctaacatcaggggtc

SEQ ID NO: 3102 - DNA, 18 bp, Artificial Sequence
  Description of Artificial Sequence: Synthetic oligonucleotide
tctagatgctaacatcag

SEQ ID NO: 3103 - DNA, 18 bp, Artificial Sequence
  Description of Artificial Sequence: Synthetic oligonucleotide
gaacgtctagatgctaac

SEQ ID NO: 3104 - DNA, 18 bp, Artificial Sequence
  Description of Artificial Sequence: Synthetic oligonucleotide
tcatagaacgtctagatg

SEQ ID NO: 3105 - DNA, 18 bp, Artificial Sequence
  Description of Artificial Sequence: Synthetic oligonucleotide
catcatcatagaacgtct

SEQ ID NO: 3106 - DNA, 18 bp, Artificial Sequence
  Description of Artificial Sequence: Synthetic oligonucleotide
taggacatcatcatagaa

SEQ ID NO: 3107 - DNA, 18 bp, Artificial Sequence
  Description of Artificial Sequence: Synthetic oligonucleotide
cagcataggacatcatca

SEQ ID NO: 3108 - DNA, 18 bp, Artificial Sequence
  Description of Artificial Sequence: Synthetic oligonucleotide
ttctgcagcataggacat

SEQ ID NO: 3109 - DNA, 18 bp, Artificial Sequence
  Description of Artificial Sequence: Synthetic oligonucleotide
gaacgttctgcagcatag

SEQ ID NO: 3110 - DNA, 18 bp, Artificial Sequence
  Description of Artificial Sequence: Synthetic oligonucleotide
tcatggaacgttctgcag

SEQ ID NO: 3111 - DNA, 18 bp, Artificial Sequence
  Description of Artificial Sequence: Synthetic oligonucleotide
tgacatcatggaacgttc

SEQ ID NO: 3112 - DNA, 18 bp, Artificial Sequence
  Description of Artificial Sequence: Synthetic oligonucleotide
taagatgacatcatggaa

SEQ ID NO: 3113 - DNA, 18 bp, Artificial Sequence
  Description of Artificial Sequence: Synthetic oligonucleotide
gttcgtaagatgacatca

SEQ ID NO: 3114 - DNA, 18 bp, Artificial Sequence
  Description of Artificial Sequence: Synthetic oligonucleotide
agagcgttcgtaagatga

SEQ ID NO: 3115 - DNA, 18 bp, Artificial Sequence
  Description of Artificial Sequence: Synthetic oligonucleotide
atcatagagcgttcgtaa

SEQ ID NO: 3116 - DNA, 18 bp, Artificial Sequence
  Description of Artificial Sequence: Synthetic oligonucleotide
aagacatcatagagcgtt

SEQ ID NO: 3117 - DNA, 18 bp, Artificial Sequence
  Description of Artificial Sequence: Synthetic oligonucleotide
ctcataagacatcataga

SEQ ID NO: 3118 - DNA, 18 bp, Artificial Sequence
  Description of Artificial Sequence: Synthetic oligonucleotide
gaccgctcataagacatc

SEQ ID NO: 3119 - DNA, 18 bp, Artificial Sequence
  Description of Artificial Sequence: Synthetic oligonucleotide
tcatagaccgctcataag

SEQ ID NO: 3120 - DNA, 18 bp, Artificial Sequence
  Description of Artificial Sequence: Synthetic oligonucleotide
ggacatcatagaccgctc

SEQ ID NO: 3121 - DNA, 18 bp, Artificial Sequence
  Description of Artificial Sequence: Synthetic oligonucleotide
ataggggacatcatagac

SEQ ID NO: 3122 - DNA, 18 bp, Artificial Sequence
  Description of Artificial Sequence: Synthetic oligonucleotide
cagccataggggacatca

SEQ ID NO: 3123 - DNA, 18 bp, Artificial Sequence
  Description of Artificial Sequence: Synthetic oligonucleotide
gcgttcagccatagggga

SEQ ID NO: 3124 - DNA, 18 bp, Artificial Sequence
  Description of Artificial Sequence: Synthetic oligonucleotide
atagagcgttcagccata

SEQ ID NO: 3125 - DNA, 18 bp, Artificial Sequence
  Description of Artificial Sequence: Synthetic oligonucleotide
acatcatagagcgttcag

SEQ ID NO: 3126 - DNA, 18 bp, Artificial Sequence
  Description of Artificial Sequence: Synthetic oligonucleotide
ggctgacatcatagagcg

SEQ ID NO: 3127 - DNA, 18 bp, Artificial Sequence
  Description of Artificial Sequence: Synthetic oligonucleotide
tcgtaggctgacatcata

SEQ ID NO: 3128 - DNA, 18 bp, Artificial Sequence
  Description of Artificial Sequence: Synthetic oligonucleotide
agcgctcgtaggctgaca

SEQ ID NO: 3129 - DNA, 18 bp, Artificial Sequence
  Description of Artificial Sequence: Synthetic oligonucleotide
catagagcgctcgtaggc

SEQ ID NO: 3130 - DNA, 18 bp, Artificial Sequence
  Description of Artificial Sequence: Synthetic oligonucleotide
gacatcatagagcgctcg

SEQ ID NO: 3131 - DNA, 18 bp, Artificial Sequence
  Description of Artificial Sequence: Synthetic oligonucleotide
aggctgacatcatagagc

SEQ ID NO: 3132 - DNA, 18 bp, Artificial Sequence
  Description of Artificial Sequence: Synthetic oligonucleotide
ctcgtaggctgacatcat

SEQ ID NO: 3133 - DNA, 18 bp, Artificial Sequence
  Description of Artificial Sequence: Synthetic oligonucleotide
gagcgctcgtaggctgac

SEQ ID NO: 3134 - DNA, 18 bp, Artificial Sequence
  Description of Artificial Sequence: Synthetic oligonucleotide
tcatagagcgctcgtagg

SEQ ID NO: 3135 - DNA, 18 bp, Artificial Sequence
  Description of Artificial Sequence: Synthetic oligonucleotide
ggacatcatagagcgctc

SEQ ID NO: 3136 - DNA, 18 bp, Artificial Sequence
  Description of Artificial Sequence: Synthetic oligonucleotide
ataggggacatcatagag

SEQ ID NO: 3137 - DNA, 18 bp, Artificial Sequence
  Description of Artificial Sequence: Synthetic oligonucleotide
cagccataggggacatca

SEQ ID NO: 3138 - DNA, 18 bp, Artificial Sequence
  Description of Artificial Sequence: Synthetic oligonucleotide
gcgctcagccatagggga

SEQ ID NO: 3139 - DNA, 18 bp, Artificial Sequence
  Description of Artificial Sequence: Synthetic oligonucleotide
atagagcgctcagccata

SEQ ID NO: 3140 - DNA, 18 bp, Artificial Sequence
  Description of Artificial Sequence: Synthetic oligonucleotide
acatcatagagcgctcag

SEQ ID NO: 3141 - DNA, 18 bp, Artificial Sequence
  Description of Artificial Sequence: Synthetic oligonucleotide
agctgacatcatagagcg

SEQ ID NO: 3142 - DNA, 18 bp, Artificial Sequence
  Description of Artificial Sequence: Synthetic oligonucleotide
tcataagctgacatcata

SEQ ID NO: 3143 - DNA, 18 bp, Artificial Sequence
  Description of Artificial Sequence: Synthetic oligonucleotide
agcgttcataagctgaca

SEQ ID NO: 3144 - DNA, 18 bp, Artificial Sequence
  Description of Artificial Sequence: Synthetic oligonucleotide
catggagcgttcataagc

SEQ ID NO: 3145 - DNA, 18 bp, Artificial Sequence
  Description of Artificial Sequence: Synthetic oligonucleotide
gacatcatggagcgttca

SEQ ID NO: 3146 - DNA, 18 bp, Artificial Sequence
  Description of Artificial Sequence: Synthetic oligonucleotide
aagctgacatcatggagc

SEQ ID NO: 3147 - DNA, 18 bp, Artificial Sequence
  Description of Artificial Sequence: Synthetic oligonucleotide
ttcataagctgacatcat

SEQ ID NO: 3148 - DNA, 18 bp, Artificial Sequence
  Description of Artificial Sequence: Synthetic oligonucleotide
gagcgttcataagctgac

SEQ ID NO: 3149 - DNA, 18 bp, Artificial Sequence
  Description of Artificial Sequence: Synthetic oligonucleotide
tcatggagcgttcataag

SEQ ID NO: 3150 - DNA, 18 bp, Artificial Sequence
  Description of Artificial Sequence: Synthetic oligonucleotide
ggacatcatggagcgttc

SEQ ID NO: 3151 - DNA, 18 bp, Artificial Sequence
  Description of Artificial Sequence: Synthetic oligonucleotide
attggggacatcatggag

SEQ ID NO: 3152 - DNA, 18 bp, Artificial Sequence
  Description of Artificial Sequence: Synthetic oligonucleotide
cagccattggggacatca

SEQ ID NO: 3153 - DNA, 18 bp, Artificial Sequence
  Description of Artificial Sequence: Synthetic oligonucleotide
tcgatcagccattgggga

SEQ ID NO: 3154 - DNA, 18 bp, Artificial Sequence
  Description of Artificial Sequence: Synthetic oligonucleotide
atagatcgatcagccatt

SEQ ID NO: 3155 - DNA, 18 bp, Artificial Sequence
  Description of Artificial Sequence: Synthetic oligonucleotide
acatcatagatcgatcag

SEQ ID NO: 3156 - DNA, 18 bp, Artificial Sequence
  Description of Artificial Sequence: Synthetic oligonucleotide
catggacatcatagatcg

SEQ ID NO: 3157 - DNA, 18 bp, Artificial Sequence
  Description of Artificial Sequence: Synthetic oligonucleotide
gcacccatggacatcata

SEQ ID NO: 3158 - DNA, 18 bp, Artificial Sequence
  Description of Artificial Sequence: Synthetic oligonucleotide
ggtcagcacccatggaca

SEQ ID NO: 3159 - DNA, 18 bp, Artificial Sequence
  Description of Artificial Sequence: Synthetic oligonucleotide
agaccggtcagcacccat

SEQ ID NO: 3160 - DNA, 18 bp, Artificial Sequence
  Description of Artificial Sequence: Synthetic oligonucleotide
atcatagaccggtcagca

SEQ ID NO: 3161 - DNA, 18 bp, Artificial Sequence
  Description of Artificial Sequence: Synthetic oligonucleotide
acgacatcatagaccggt

SEQ ID NO: 3162 - DNA, 18 bp, Artificial Sequence
  Description of Artificial Sequence: Synthetic oligonucleotide
gtatgacgacatcataga

SEQ ID NO: 3163 - DNA, 18 bp, Artificial Sequence
  Description of Artificial Sequence: Synthetic oligonucleotide
gcagagtatgacgacatc

SEQ ID NO: 3164 - DNA, 18 bp, Artificial Sequence
  Description of Artificial Sequence: Synthetic oligonucleotide
cagcagcagagtatgacg

SEQ ID NO: 3165 - DNA, 18 bp, Artificial Sequence
  Description of Artificial Sequence: Synthetic oligonucleotide
ccggtcagcagcagagta

SEQ ID NO: 3166 - DNA, 18 bp, Artificial Sequence
  Description of Artificial Sequence: Synthetic oligonucleotide
atagaccggtcagcagca

SEQ ID NO: 3167 - DNA, 18 bp, Artificial Sequence
  Description of Artificial Sequence: Synthetic oligonucleotide
acatcatagaccggtcag

SEQ ID NO: 3168 - DNA, 18 bp, Artificial Sequence
  Description of Artificial Sequence: Synthetic oligonucleotide
cgatgacatcatagaccg

SEQ ID NO: 3169 - DNA, 18 bp, Artificial Sequence
  Description of Artificial Sequence: Synthetic oligonucleotide
gagtacgatgacatcata

SEQ ID NO: 3170 - DNA, 18 bp, Artificial Sequence
  Description of Artificial Sequence: Synthetic oligonucleotide
ctgcagagtacgatgaca

SEQ ID NO: 3171 - DNA, 18 bp, Artificial Sequence
  Description of Artificial Sequence: Synthetic oligonucleotide
cagctgcagagtacgatg

SEQ ID NO: 3172 - DNA, 18 bp, Artificial Sequence
  Description of Artificial Sequence: Synthetic oligonucleotide
tcggtcagctgcagagta

SEQ ID NO: 3173 - DNA, 18 bp, Artificial Sequence
  Description of Artificial Sequence: Synthetic oligonucleotide
atagatcggtcagctgca

SEQ ID NO: 3174 - DNA, 18 bp, Artificial Sequence
  Description of Artificial Sequence: Synthetic oligonucleotide
acatcatagatcggtcag

SEQ ID NO: 3175 - DNA, 18 bp, Artificial Sequence
  Description of Artificial Sequence: Synthetic oligonucleotide
agatgacatcatagatcg

SEQ ID NO: 3176 - DNA, 18 bp, Artificial Sequence
  Description of Artificial Sequence: Synthetic oligonucleotide
gtataagatgacatcata

SEQ ID NO: 3177 - DNA, 18 bp, Artificial Sequence
  Description of Artificial Sequence: Synthetic oligonucleotide
cagcagtataagatgaca

SEQ ID NO: 3178 - DNA, 18 bp, Artificial Sequence
  Description of Artificial Sequence: Synthetic oligonucleotide
acgatcagcagtataaga

SEQ ID NO: 3179 - DNA, 18 bp, Artificial Sequence
  Description of Artificial Sequence: Synthetic oligonucleotide
attgaacgatcagcagta

SEQ ID NO: 3180 - DNA, 18 bp, Artificial Sequence
  Description of Artificial Sequence: Synthetic oligonucleotide
acatcattgaacgatcag

SEQ ID NO: 3181 - DNA, 18 bp, Artificial Sequence
  Description of Artificial Sequence: Synthetic oligonucleotide
catagacatcattgaacg

SEQ ID NO: 3182 - DNA, 18 bp, Artificial Sequence
  Description of Artificial Sequence: Synthetic oligonucleotide
gcagccatagacatcatt

SEQ ID NO: 3183 - DNA, 18 bp, Artificial Sequence
  Description of Artificial Sequence: Synthetic oligonucleotide
aatcagcagccatagaca

SEQ ID NO: 3184 - DNA, 18 bp, Artificial Sequence
  Description of Artificial Sequence: Synthetic oligonucleotide
gtaagaatcagcagccat

SEQ ID NO: 3185 - DNA, 18 bp, Artificial Sequence
  Description of Artificial Sequence: Synthetic oligonucleotide
tcggtgtaagaatcagca

SEQ ID NO: 3186 - DNA, 18 bp, Artificial Sequence
  Description of Artificial Sequence: Synthetic oligonucleotide
aagaatcggtgtaagaat

SEQ ID NO: 3187 - DNA, 18 bp, Artificial Sequence
  Description of Artificial Sequence: Synthetic oligonucleotide
agtgtaagaatcggtgta

SEQ ID NO: 3188 - DNA, 18 bp, Artificial Sequence
  Description of Artificial Sequence: Synthetic oligonucleotide
gtgtcagtgtaagaatcg

SEQ ID NO: 3189 - DNA, 18 bp, Artificial Sequence
  Description of Artificial Sequence: Synthetic oligonucleotide
tatatgtgtcagtgtaag

SEQ ID NO: 3190 - DNA, 18 bp, Artificial Sequence
  Description of Artificial Sequence: Synthetic oligonucleotide
ctctgtatatgtgtcagt

SEQ ID NO: 3191 - DNA, 18 bp, Artificial Sequence
  Description of Artificial Sequence: Synthetic oligonucleotide
tatgcctctgtatatgtg

SEQ ID NO: 3192 - DNA, 18 bp, Artificial Sequence
  Description of Artificial Sequence: Synthetic oligonucleotide
ccatatatgcctctgtat

SEQ ID NO: 3193 - DNA, 18 bp, Artificial Sequence
  Description of Artificial Sequence: Synthetic oligonucleotide
tggcaccatatatgcctc

SEQ ID NO: 3194 - DNA, 18 bp, Artificial Sequence
  Description of Artificial Sequence: Synthetic oligonucleotide
aaaggtggcaccatatat

SEQ ID NO: 3195 - DNA, 18 bp, Artificial Sequence
  Description of Artificial Sequence: Synthetic oligonucleotide
gaggcaaaggtggcacca

SEQ ID NO: 3196 - DNA, 18 bp, Artificial Sequence
  Description of Artificial Sequence: Synthetic oligonucleotide
ttcaggaggcaaaggtgg

SEQ ID NO: 3197 - DNA, 18 bp, Artificial Sequence
  Description of Artificial Sequence: Synthetic oligonucleotide
ggctcttcaggaggcaaa

SEQ ID NO: 3198 - DNA, 18 bp, Artificial Sequence
  Description of Artificial Sequence: Synthetic oligonucleotide
ttgggggctcttcaggag

SEQ ID NO: 3199 - DNA, 18 bp, Artificial Sequence
  Description of Artificial Sequence: Synthetic oligonucleotide
cattgttgggggctcttc

SEQ ID NO: 3200 - DNA, 18 bp, Artificial Sequence
  Description of Artificial Sequence: Synthetic oligonucleotide
ggtggcattgttgggggc

SEQ ID NO: 3201 - DNA, 18 bp, Artificial Sequence
  Description of Artificial Sequence: Synthetic oligonucleotide
gcaacggtggcattgttg

SEQ ID NO: 3202 - DNA, 18 bp, Artificial Sequence
  Description of Artificial Sequence: Synthetic oligonucleotide
aggtggcaacggtggcat

SEQ ID NO: 3203 - DNA, 18 bp, Artificial Sequence
  Description of Artificial Sequence: Synthetic oligonucleotide
tcctcaggtggcaacggt

SEQ ID NO: 3204 - DNA, 18 bp, Artificial Sequence
  Description of Artificial Sequence: Synthetic oligonucleotide
gtggctcctcaggtggca

SEQ ID NO: 3205 - DNA, 18 bp, Artificial Sequence
  Description of Artificial Sequence: Synthetic oligonucleotide
cattggtggctcctcagg

SEQ ID NO: 3206 - DNA, 18 bp, Artificial Sequence
  Description of Artificial Sequence: Synthetic oligonucleotide
ggtgtcattggtggctcc

SEQ ID NO: 3207 - DNA, 18 bp, Artificial Sequence
  Description of Artificial Sequence: Synthetic oligonucleotide
atggtggtgtcattggtg

SEQ ID NO: 3208 - DNA, 18 bp, Artificial Sequence
  Description of Artificial Sequence: Synthetic oligonucleotide
aggcaatggtggtgtcat

SEQ ID NO: 3209 - DNA, 18 bp, Artificial Sequence
  Description of Artificial Sequence: Synthetic oligonucleotide
tcaggaggcaatggtggt

SEQ ID NO: 3210 - DNA, 18 bp, Artificial Sequence
  Description of Artificial Sequence: Synthetic oligonucleotide
gttcctcaggaggcaatg

SEQ ID NO: 3211 - DNA, 18 bp, Artificial Sequence
  Description of Artificial Sequence: Synthetic oligonucleotide
tggtggttcctcaggagg

SEQ ID NO: 3212 - DNA, 18 bp, Artificial Sequence
  Description of Artificial Sequence: Synthetic oligonucleotide
ccctctggtggttcctca

SEQ ID NO: 3213 - DNA, 18 bp, Artificial Sequence
  Description of Artificial Sequence: Synthetic oligonucleotide
ctggaccctctggtggtt

SEQ ID NO: 3214 - DNA, 18 bp, Artificial Sequence
  Description of Artificial Sequence: Synthetic oligonucleotide
caatgctggaccctctgg

SEQ ID NO: 3215 - DNA, 18 bp, Artificial Sequence
  Description of Artificial Sequence: Synthetic oligonucleotide
gtgggcaatgctggaccc

SEQ ID NO: 3216 - DNA, 18 bp, Artificial Sequence
  Description of Artificial Sequence: Synthetic oligonucleotide
gctcagtgggcaatgctg

SEQ ID NO: 3217 - DNA, 18 bp, Artificial Sequence
  Description of Artificial Sequence: Synthetic oligonucleotide
tgactgctcagtgggcaa

SEQ ID NO: 3218 - DNA, 18 bp, Artificial Sequence
  Description of Artificial Sequence: Synthetic oligonucleotide
aatgctgactgctcagtg

SEQ ID NO: 3219 - DNA, 18 bp, Artificial Sequence
  Description of Artificial Sequence: Synthetic oligonucleotide
ctgttaatgctgactgct

SEQ ID NO: 3220 - DNA, 18 bp, Artificial Sequence
  Description of Artificial Sequence: Synthetic oligonucleotide
ttcagctgttaatgctga

SEQ ID NO: 3221 - DNA, 18 bp, Artificial Sequence
  Description of Artificial Sequence: Synthetic oligonucleotide
gtattttcagctgttaat

SEQ ID NO: 3222 - DNA, 18 bp, Artificial Sequence
  Description of Artificial Sequence: Synthetic oligonucleotide
gccaagtattttcagctg

SEQ ID NO: 3223 - DNA, 18 bp, Artificial Sequence
  Description of Artificial Sequence: Synthetic oligonucleotide
tgtaggccaagtattttc

SEQ ID NO: 3224 - DNA, 18 bp, Artificial Sequence
  Description of Artificial Sequence: Synthetic oligonucleotide
acctctgtaggccaagta

SEQ ID NO: 3225 - DNA, 18 bp, Artificial Sequence
  Description of Artificial Sequence: Synthetic oligonucleotide
atggcacctctgtaggcc

SEQ ID NO: 3226 - DNA, 18 bp, Artificial Sequence
  Description of Artificial Sequence: Synthetic oligonucleotide
tgatgatggcacctctgt

SEQ ID NO: 3227 - DNA, 18 bp, Artificial Sequence
  Description of Artificial Sequence: Synthetic oligonucleotide
gatggtgatgatggcacc

SEQ ID NO: 3228 - DNA, 18 bp, Artificial Sequence
  Description of Artificial Sequence: Synthetic oligonucleotide
cttcagatggtgatgatg

SEQ ID NO: 3229 - DNA, 18 bp, Artificial Sequence
  Description of Artificial Sequence: Synthetic oligonucleotide
agactcttcagatggtga

SEQ ID NO: 3230 - DNA, 18 bp, Artificial Sequence
  Description of Artificial Sequence: Synthetic oligonucleotide
gatacagactcttcagat

SEQ ID NO: 3231 - DNA, 18 bp, Artificial Sequence
  Description of Artificial Sequence: Synthetic oligonucleotide
gctgcgatacagactctt

SEQ ID NO: 3232 - DNA, 18 bp, Artificial Sequence
  Description of Artificial Sequence: Synthetic oligonucleotide
ctcaggctgcgatacaga

SEQ ID NO: 3233 - DNA, 18 bp, Artificial Sequence
  Description of Artificial Sequence: Synthetic oligonucleotide
ggaggctcaggctgcgat

SEQ ID NO: 3234 - DNA, 18 bp, Artificial Sequence
  Description of Artificial Sequence: Synthetic oligonucleotide
tcacaggaggctcaggct

SEQ ID NO: 3235 - DNA, 18 bp, Artificial Sequence
  Description of Artificial Sequence: Synthetic oligonucleotide
ttgactcacaggaggctc

SEQ ID NO: 3236 - DNA, 18 bp, Artificial Sequence
  Description of Artificial Sequence: Synthetic oligonucleotide
tcactttgactcacagga

SEQ ID NO: 3237 - DNA, 18 bp, Artificial Sequence
  Description of Artificial Sequence: Synthetic oligonucleotide
aaatctcactttgactca

SEQ ID NO: 3238 - DNA, 18 bp, Artificial Sequence
  Description of Artificial Sequence: Synthetic oligonucleotide
ctccgaaatctcactttg

SEQ ID NO: 3239 - DNA, 18 bp, Artificial Sequence
  Description of Artificial Sequence: Synthetic oligonucleotide
gaaggctccgaaatctca

SEQ ID NO: 3240 - DNA, 18 bp, Artificial Sequence
  Description of Artificial Sequence: Synthetic oligonucleotide
ctgctgaaggctccgaaa

SEQ ID NO: 3241 - DNA, 18 bp, Artificial Sequence
  Description of Artificial Sequence: Synthetic oligonucleotide
aggcactgctgaaggctc

SEQ ID NO: 3242 - DNA, 18 bp, Artificial Sequence
  Description of Artificial Sequence: Synthetic oligonucleotide
tcagtaggcactgctgaa

SEQ ID NO: 3243 - DNA, 18 bp, Artificial Sequence
  Description of Artificial Sequence: Synthetic oligonucleotide
aataatcagtaggcactg

SEQ ID NO: 3244 - DNA, 18 bp, Artificial Sequence
  Description of Artificial Sequence: Synthetic oligonucleotide
cactgaataatcagtagg

SEQ ID NO: 3245 - DNA, 18 bp, Artificial Sequence
  Description of Artificial Sequence: Synthetic oligonucleotide
gctgacactgaataatca

SEQ ID NO: 3246 - DNA, 18 bp, Artificial Sequence
  Description of Artificial Sequence: Synthetic oligonucleotide
ctgatgctgacactgaat

SEQ ID NO: 3247 - DNA, 18 bp, Artificial Sequence
  Description of Artificial Sequence: Synthetic oligonucleotide
gggatctgatgctgacac

SEQ ID NO: 3248 - DNA, 18 bp, Artificial Sequence
  Description of Artificial Sequence: Synthetic oligonucleotide
actgagggatctgatgct

SEQ ID NO: 3249 - DNA, 18 bp, Artificial Sequence
  Description of Artificial Sequence: Synthetic oligonucleotide
ctaaaactgagggatctg

SEQ ID NO: 3250 - DNA, 18 bp, Artificial Sequence
  Description of Artificial Sequence: Synthetic oligonucleotide
tgatactaaaactgaggg

SEQ ID NO: 3251 - DNA, 18 bp, Artificial Sequence
  Description of Artificial Sequence: Synthetic oligonucleotide
gcctctgatactaaaact

SEQ ID NO: 3252 - DNA, 18 bp, Artificial Sequence
  Description of Artificial Sequence: Synthetic oligonucleotide
cagcagcctctgatacta

SEQ ID NO: 3253 - DNA, 18 bp, Artificial Sequence
  Description of Artificial Sequence: Synthetic oligonucleotide
agtcacagcagcctctga

SEQ ID NO: 3254 - DNA, 18 bp, Artificial Sequence
  Description of Artificial Sequence: Synthetic oligonucleotide
ggaacagtcacagcagcc

SEQ ID NO: 3255 - DNA, 18 bp, Artificial Sequence
  Description of Artificial Sequence: Synthetic oligonucleotide
gttctggaacagtcacag

SEQ ID NO: 3256 - DNA, 18 bp, Artificial Sequence
  Description of Artificial Sequence: Synthetic oligonucleotide
tggtggttctggaacagt

SEQ ID NO: 3257 - DNA, 18 bp, Artificial Sequence
  Description of Artificial Sequence: Synthetic oligonucleotide
tctggtggtggttctgga

SEQ ID NO: 3258 - DNA, 18 bp, Artificial Sequence
  Description of Artificial Sequence: Synthetic oligonucleotide
ctggctctggtggtggtt

SEQ ID NO: 3259 - DNA, 18 bp, Artificial Sequence
  Description of Artificial Sequence: Synthetic oligonucleotide
agattctggctctggtgg

SEQ ID NO: 3260 - DNA, 18 bp, Artificial Sequence
  Description of Artificial Sequence: Synthetic oligonucleotide
attgaagattctggctct

SEQ ID NO: 3261 - DNA, 18 bp, Artificial Sequence
  Description of Artificial Sequence: Synthetic oligonucleotide
acgtaattgaagattctg

SEQ ID NO: 3262 - DNA, 18 bp, Artificial Sequence
  Description of Artificial Sequence: Synthetic oligonucleotide
tgttaacgtaattgaaga

SEQ ID NO: 3263 - DNA, 18 bp, Artificial Sequence
  Description of Artificial Sequence: Synthetic oligonucleotide
acaggtgttaacgtaatt

SEQ ID NO: 3264 - DNA, 18 bp, Artificial Sequence
  Description of Artificial Sequence: Synthetic oligonucleotide
actctacaggtgttaacg

SEQ ID NO: 3265 - DNA, 18 bp, Artificial Sequence
  Description of Artificial Sequence: Synthetic oligonucleotide
tgcagactctacaggtgt

SEQ ID NO: 3266 - DNA, 18 bp, Artificial Sequence
  Description of Artificial Sequence: Synthetic oligonucleotide
actactgcagactctaca

SEQ ID NO: 3267 - DNA, 18 bp, Artificial Sequence
  Description of Artificial Sequence: Synthetic oligonucleotide
ctgctactactgcagact

SEQ ID NO: 3268 - DNA, 18 bp, Artificial Sequence
  Description of Artificial Sequence: Synthetic oligonucleotide
ttcttctgctactactgc

SEQ ID NO: 3269 - DNA, 18 bp, Artificial Sequence
  Description of Artificial Sequence: Synthetic oligonucleotide
tcatgttcttctgctact

SEQ ID NO: 3270 - DNA, 18 bp, Artificial Sequence
  Description of Artificial Sequence: Synthetic oligonucleotide
caacttcatgttcttctg

SEQ ID NO: 3271 - DNA, 18 bp, Artificial Sequence
  Description of Artificial Sequence: Synthetic oligonucleotide
tggaacaacttcatgttc

SEQ ID NO: 3272 - DNA, 18 bp, Artificial Sequence
  Description of Artificial Sequence: Synthetic oligonucleotide
ctctctggaacaacttca

SEQ ID NO: 3273 - DNA, 18 bp, Artificial Sequence
  Description of Artificial Sequence: Synthetic oligonucleotide
ctggtctctctggaacaa

SEQ ID NO: 3274 - DNA, 18 bp, Artificial Sequence
  Description of Artificial Sequence: Synthetic oligonucleotide
agtcactggtctctctgg

SEQ ID NO: 3275 - DNA, 18 bp, Artificial Sequence
  Description of Artificial Sequence: Synthetic oligonucleotide
atacaagtcactggtctc

SEQ ID NO: 3276 - DNA, 18 bp, Artificial Sequence
  Description of Artificial Sequence: Synthetic oligonucleotide
ataccatacaagtcactg

SEQ ID NO: 3277 - DNA, 18 bp, Artificial Sequence
  Description of Artificial Sequence: Synthetic oligonucleotide
ttcagataccatacaagt

SEQ ID NO: 3278 - DNA, 18 bp, Artificial Sequence
  Description of Artificial Sequence: Synthetic oligonucleotide
ggagtttcagataccata

SEQ ID NO: 3279 - DNA, 18 bp, Artificial Sequence
  Description of Artificial Sequence: Synthetic oligonucleotide
tggcgggagtttcagata

SEQ ID NO: 3280 - DNA, 18 bp, Artificial Sequence
  Description of Artificial Sequence: Synthetic oligonucleotide
tgacatggcgggagtttc

SEQ ID NO: 3281 - DNA, 18 bp, Artificial Sequence
  Description of Artificial Sequence: Synthetic oligonucleotide
tcagctgacatggcggga

SEQ ID NO: 3282 - DNA, 18 bp, Artificial Sequence
  Description of Artificial Sequence: Synthetic oligonucleotide
ttggttcagctgacatgg

SEQ ID NO: 3283 - DNA, 18 bp, Artificial Sequence
  Description of Artificial Sequence: Synthetic oligonucleotide
cacagttggttcagctga

SEQ ID NO: 3284 - DNA, 18 bp, Artificial Sequence
  Description of Artificial Sequence: Synthetic oligonucleotide
gctaacacagttggttca

SEQ ID NO: 3285 - DNA, 18 bp, Artificial Sequence
  Description of Artificial Sequence: Synthetic oligonucleotide
ctgatgctaacacagttg

SEQ ID NO: 3286 - DNA, 18 bp, Artificial Sequence
  Description of Artificial Sequence: Synthetic oligonucleotide
aggctctgatgctaacac

SEQ ID NO: 3287 - DNA, 18 bp, Artificial Sequence
  Description of Artificial Sequence: Synthetic oligonucleotide
acaggaggctctgatgct

SEQ ID NO: 3288 - DNA, 18 bp, Artificial Sequence
  Description of Artificial Sequence: Synthetic oligonucleotide
acataacaggaggctctg

SEQ ID NO: 3289 - DNA, 18 bp, Artificial Sequence
  Description of Artificial Sequence: Synthetic oligonucleotide
ctctgacataacaggagg

SEQ ID NO: 3290 - DNA, 18 bp, Artificial Sequence
  Description of Artificial Sequence: Synthetic oligonucleotide
gctgtctctgacataaca

SEQ ID NO: 3291 - DNA, 18 bp, Artificial Sequence
  Description of Artificial Sequence: Synthetic oligonucleotide
tttctgctgtctctgaca

SEQ ID NO: 3292 - DNA, 18 bp, Artificial Sequence
  Description of Artificial Sequence: Synthetic oligonucleotide
aaatgtttctgctgtctc

SEQ ID NO: 3293 - DNA, 18 bp, Artificial Sequence
  Description of Artificial Sequence: Synthetic oligonucleotide
gaatcaaatgtttctgct

SEQ ID NO: 3294 - DNA, 18 bp, Artificial Sequence
  Description of Artificial Sequence: Synthetic oligonucleotide
tcatggaatcaaatgttt

SEQ ID NO: 3295 - DNA, 18 bp, Artificial Sequence
  Description of Artificial Sequence: Synthetic oligonucleotide
ggctctcatggaatcaaa

SEQ ID NO: 3296 - DNA, 18 bp, Artificial Sequence
  Description of Artificial Sequence: Synthetic oligonucleotide
cctgaggctctcatggaa

SEQ ID NO: 3297 - DNA, 18 bp, Artificial Sequence
  Description of Artificial Sequence: Synthetic oligonucleotide
catgtcctgaggctctca

SEQ ID NO: 3298 - DNA, 18 bp, Artificial Sequence
  Description of Artificial Sequence: Synthetic oligonucleotide
ggcaacatgtcctgaggc

SEQ ID NO: 3299 - DNA, 18 bp, Artificial Sequence
  Description of Artificial Sequence: Synthetic oligonucleotide
tctgaggcaacatgtcct

SEQ ID NO: 3300 - DNA, 18 bp, Artificial Sequence
  Description of Artificial Sequence: Synthetic oligonucleotide
atacttctgaggcaacat

SEQ ID NO: 3301 - DNA, 18 bp, Artificial Sequence
  Description of Artificial Sequence: Synthetic oligonucleotide
tgtagatacttctgaggc

SEQ ID NO: 3302 - DNA, 18 bp, Artificial Sequence
  Description of Artificial Sequence: Synthetic oligonucleotide
aaggatgtagatacttct

SEQ ID NO: 3303 - DNA, 18 bp, Artificial Sequence
  Description of Artificial Sequence: Synthetic oligonucleotide
ccaacaaggatgtagata

SEQ ID NO: 3304 - DNA, 18 bp, Artificial Sequence
  Description of Artificial Sequence: Synthetic oligonucleotide
tggaaccaacaaggatgt

SEQ ID NO: 3305 - DNA, 18 bp, Artificial Sequence
  Description of Artificial Sequence: Synthetic oligonucleotide
actgctggaaccaacaag

SEQ ID NO: 3306 - DNA, 18 bp, Artificial Sequence
  Description of Artificial Sequence: Synthetic oligonucleotide
tagttactgctggaacca

SEQ ID NO: 3307 - DNA, 18 bp, Artificial Sequence
  Description of Artificial Sequence: Synthetic oligonucleotide
tggagtagttactgctgg

SEQ ID NO: 3308 - DNA, 18 bp, Artificial Sequence
  Description of Artificial Sequence: Synthetic oligonucleotide
agcactggagtagttact

SEQ ID NO: 3309 - DNA, 18 bp, Artificial Sequence
  Description of Artificial Sequence: Synthetic oligonucleotide
ctgccagcactggagtag

SEQ ID NO: 3310 - DNA, 18 bp, Artificial Sequence
  Description of Artificial Sequence: Synthetic oligonucleotide
gctctctgccagcactgg

SEQ ID NO: 3311 - DNA, 18 bp, Artificial Sequence
  Description of Artificial Sequence: Synthetic oligonucleotide
agaatgctctctgccagc

SEQ ID NO: 3312 - DNA, 18 bp, Artificial Sequence
  Description of Artificial Sequence: Synthetic oligonucleotide
gctccagaatgctctctg

SEQ ID NO: 3313 - DNA, 18 bp, Artificial Sequence
  Description of Artificial Sequence: Synthetic oligonucleotide
tggcggctccagaatgct

SEQ ID NO: 3314 - DNA, 18 bp, Artificial Sequence
  Description of Artificial Sequence: Synthetic oligonucleotide
atggctggcggctccaga

SEQ ID NO: 3315 - DNA, 18 bp, Artificial Sequence
  Description of Artificial Sequence: Synthetic oligonucleotide
cagccatggctggcggct

SEQ ID NO: 3316 - DNA, 18 bp, Artificial Sequence
  Description of Artificial Sequence: Synthetic oligonucleotide
tggggcagccatggctgg

SEQ ID NO: 3317 - DNA, 18 bp, Artificial Sequence
  Description of Artificial Sequence: Synthetic oligonucleotide
gactctggggcagccatg

SEQ ID NO: 3318 - DNA, 18 bp, Artificial Sequence
  Description of Artificial Sequence: Synthetic oligonucleotide
ctgaagactctggggcag

SEQ ID NO: 3319 - DNA, 18 bp, Artificial Sequence
  Description of Artificial Sequence: Synthetic oligonucleotide
catagctgaagactctgg

SEQ ID NO: 3320 - DNA, 18 bp, Artificial Sequence
  Description of Artificial Sequence: Synthetic oligonucleotide
acagccatagctgaagac

SEQ ID NO: 3321 - DNA, 18 bp, Artificial Sequence
  Description of Artificial Sequence: Synthetic oligonucleotide
ccaggacagccatagctg

SEQ ID NO: 3322 - DNA, 18 bp, Artificial Sequence
  Description of Artificial Sequence: Synthetic oligonucleotide
agactccaggacagccat

SEQ ID NO: 3323 - DNA, 18 bp, Artificial Sequence
  Description of Artificial Sequence: Synthetic oligonucleotide
gccgaagactccaggaca

SEQ ID NO: 3324 - DNA, 18 bp, Artificial Sequence
  Description of Artificial Sequence: Synthetic oligonucleotide
tcacagccgaagactcca

SEQ ID NO: 3325 - DNA, 18 bp, Artificial Sequence
  Description of Artificial Sequence: Synthetic oligonucleotide
gacggtcacagccgaaga

SEQ ID NO: 3326 - DNA, 18 bp, Artificial Sequence
  Description of Artificial Sequence: Synthetic oligonucleotide
tccaggacggtcacagcc

SEQ ID NO: 3327 - DNA, 18 bp, Artificial Sequence
  Description of Artificial Sequence: Synthetic oligonucleotide
aagactccaggacggtca

SEQ ID NO: 3328 - DNA, 18 bp, Artificial Sequence
  Description of Artificial Sequence: Synthetic oligonucleotide
agtcgaagactccaggac

SEQ ID NO: 3329 - DNA, 18 bp, Artificial Sequence
  Description of Artificial Sequence: Synthetic oligonucleotide
gtcacagtcgaagactcc

SEQ ID NO: 3330 - DNA, 18 bp, Artificial Sequence
  Description of Artificial Sequence: Synthetic oligonucleotide
ggacagtcacagtcgaag

SEQ ID NO: 3331 - DNA, 18 bp, Artificial Sequence
  Description of Artificial Sequence: Synthetic oligonucleotide
ctccaggacagtcacagt

SEQ ID NO: 3332 - DNA, 18 bp, Artificial Sequence
  Description of Artificial Sequence: Synthetic oligonucleotide
gaagactccaggacagtc

SEQ ID NO: 3333 - DNA, 18 bp, Artificial Sequence
  Description of Artificial Sequence: Synthetic oligonucleotide
cagtcgaagactccagga

SEQ ID NO: 3334 - DNA, 18 bp, Artificial Sequence
  Description of Artificial Sequence: Synthetic oligonucleotide
agttacagtcgaagactc

SEQ ID NO: 3335 - DNA, 18 bp, Artificial Sequence
  Description of Artificial Sequence: Synthetic oligonucleotide
aggacagttacagtcgaa

SEQ ID NO: 3336 - DNA, 18 bp, Artificial Sequence
  Description of Artificial Sequence: Synthetic oligonucleotide
gctccaggacagttacag

SEQ ID NO: 3337 - DNA, 18 bp, Artificial Sequence
  Description of Artificial Sequence: Synthetic oligonucleotide
cgaaggctccaggacagt

SEQ ID NO: 3338 - DNA, 18 bp, Artificial Sequence
  Description of Artificial Sequence: Synthetic oligonucleotide
acaaccgaaggctccagg

SEQ ID NO: 3339 - DNA, 18 bp, Artificial Sequence
  Description of Artificial Sequence: Synthetic oligonucleotide
cagtcacaaccgaaggct

SEQ ID NO: 3340 - DNA, 18 bp, Artificial Sequence
  Description of Artificial Sequence: Synthetic oligonucleotide
cgggacagtcacaaccga

SEQ ID NO: 3341 - DNA, 18 bp, Artificial Sequence
  Description of Artificial Sequence: Synthetic oligonucleotide
ggctccgggacagtcaca

SEQ ID NO: 3342 - DNA, 18 bp, Artificial Sequence
  Description of Artificial Sequence: Synthetic oligonucleotide
caggaggctccgggacag

SEQ ID NO: 3343 - DNA, 18 bp, Artificial Sequence
  Description of Artificial Sequence: Synthetic oligonucleotide
cacaacaggaggctccgg

SEQ ID NO: 3344 - DNA, 18 bp, Artificial Sequence
  Description of Artificial Sequence: Synthetic oligonucleotide
tcagccacaacaggaggc

SEQ ID NO: 3345 - DNA, 18 bp, Artificial Sequence
  Description of Artificial Sequence: Synthetic oligonucleotide
ctggctcagccacaacag

SEQ ID NO: 3346 - DNA, 18 bp, Artificial Sequence
  Description of Artificial Sequence: Synthetic oligonucleotide
atagtctggctcagccac

SEQ ID NO: 3347 - DNA, 18 bp, Artificial Sequence
  Description of Artificial Sequence: Synthetic oligonucleotide
gtaacatagtctggctca

SEQ ID NO: 3348 - DNA, 18 bp, Artificial Sequence
  Description of Artificial Sequence: Synthetic oligonucleotide
gaatggtaacatagtctg

SEQ ID NO: 3349 - DNA, 18 bp, Artificial Sequence
  Description of Artificial Sequence: Synthetic oligonucleotide
cacaggaatggtaacata

SEQ ID NO: 3350 - DNA, 18 bp, Artificial Sequence
  Description of Artificial Sequence: Synthetic oligonucleotide
actggcacaggaatggta

SEQ ID NO: 3351 - DNA, 18 bp, Artificial Sequence
  Description of Artificial Sequence: Synthetic oligonucleotide
aaacaactggcacaggaa

SEQ ID NO: 3352 - DNA, 18 bp, Artificial Sequence
  Description of Artificial Sequence: Synthetic oligonucleotide
cgcagaaacaactggcac

SEQ ID NO: 3353 - DNA, 18 bp, Artificial Sequence
  Description of Artificial Sequence: Synthetic oligonucleotide
tccagcgcagaaacaact

SEQ ID NO: 3354 - DNA, 18 bp, Artificial Sequence
  Description of Artificial Sequence: Synthetic oligonucleotide
aaggctccagcgcagaaa

SEQ ID NO: 3355 - DNA, 18 bp, Artificial Sequence
  Description of Artificial Sequence: Synthetic oligonucleotide
cacagaaggctccagcgc

SEQ ID NO: 3356 - DNA, 18 bp, Artificial Sequence
  Description of Artificial Sequence: Synthetic oligonucleotide
acaggcacagaaggctcc

SEQ ID NO: 3357 - DNA, 18 bp, Artificial Sequence
  Description of Artificial Sequence: Synthetic oligonucleotide
ccagaacaggcacagaag

SEQ ID NO: 3358 - DNA, 18 bp, Artificial Sequence
  Description of Artificial Sequence: Synthetic oligonucleotide
tggttccagaacaggcac

SEQ ID NO: 3359 - DNA, 18 bp, Artificial Sequence
  Description of Artificial Sequence: Synthetic oligonucleotide
accgctggttccagaaca

SEQ ID NO: 3360 - DNA, 18 bp, Artificial Sequence
  Description of Artificial Sequence: Synthetic oligonucleotide
ctgacaccgctggttcca

SEQ ID NO: 3361 - DNA, 18 bp, Artificial Sequence
  Description of Artificial Sequence: Synthetic oligonucleotide
aaggactgacaccgctgg

SEQ ID NO: 3362 - DNA, 18 bp, Artificial Sequence
  Description of Artificial Sequence: Synthetic oligonucleotide
ggttgaaggactgacacc

SEQ ID NO: 3363 - DNA, 18 bp, Artificial Sequence
  Description of Artificial Sequence: Synthetic oligonucleotide
tagaaggttgaaggactg

SEQ ID NO: 3364 - DNA, 18 bp, Artificial Sequence
  Description of Artificial Sequence: Synthetic oligonucleotide
aatcatagaaggttgaag

SEQ ID NO: 3365 - DNA, 18 bp, Artificial Sequence
  Description of Artificial Sequence: Synthetic oligonucleotide
gaaacaatcatagaaggt

SEQ ID NO: 3366 - DNA, 18 bp, Artificial Sequence
  Description of Artificial Sequence: Synthetic oligonucleotide
gttctgaaacaatcatag

SEQ ID NO: 3367 - DNA, 18 bp, Artificial Sequence
  Description of Artificial Sequence: Synthetic oligonucleotide
agatggttctgaaacaat

SEQ ID NO: 3368 - DNA, 18 bp, Artificial Sequence
  Description of Artificial Sequence: Synthetic oligonucleotide
gaaacagatggttctgaa

SEQ ID NO: 3369 - DNA, 18 bp, Artificial Sequence
  Description of Artificial Sequence: Synthetic oligonucleotide
ggacagaaacagatggtt

SEQ ID NO: 3370 - DNA, 18 bp, Artificial Sequence
  Description of Artificial Sequence: Synthetic oligonucleotide
ttcctggacagaaacaga

SEQ ID NO: 3371 - DNA, 18 bp, Artificial Sequence
  Description of Artificial Sequence: Synthetic oligonucleotide
gtcgattcctggacagaa

SEQ ID NO: 3372 - DNA, 18 bp, Artificial Sequence
  Description of Artificial Sequence: Synthetic oligonucleotide
tcacagtcgattcctgga

SEQ ID NO: 3373 - DNA, 18 bp, Artificial Sequence
  Description of Artificial Sequence: Synthetic oligonucleotide
aactgtcacagtcgattc

SEQ ID NO: 3374 - DNA, 18 bp, Artificial Sequence
  Description of Artificial Sequence: Synthetic oligonucleotide
tctgaaactgtcacagtc

SEQ ID NO: 3375 - DNA, 18 bp, Artificial Sequence
  Description of Artificial Sequence: Synthetic oligonucleotide
caggctctgaaactgtca

SEQ ID NO: 3376 - DNA, 18 bp, Artificial Sequence
  Description of Artificial Sequence: Synthetic oligonucleotide
gacagcaggctctgaaac

SEQ ID NO: 3377 - DNA, 18 bp, Artificial Sequence
  Description of Artificial Sequence: Synthetic oligonucleotide
actgtgacagcaggctct

SEQ ID NO: 3378 - DNA, 18 bp, Artificial Sequence
  Description of Artificial Sequence: Synthetic oligonucleotide
ctgagactgtgacagcag

SEQ ID NO: 3379 - DNA, 18 bp, Artificial Sequence
  Description of Artificial Sequence: Synthetic oligonucleotide
ctgctctgagactgtgac

SEQ ID NO: 3380 - DNA, 18 bp, Artificial Sequence
  Description of Artificial Sequence: Synthetic oligonucleotide
tgagtctgctctgagact

SEQ ID NO: 3381 - DNA, 18 bp, Artificial Sequence
  Description of Artificial Sequence: Synthetic oligonucleotide
ttacttgagtctgctctg

SEQ ID NO: 3382 - DNA, 18 bp, Artificial Sequence
  Description of Artificial Sequence: Synthetic oligonucleotide
tggtattacttgagtctg

SEQ ID NO: 3383 - DNA, 18 bp, Artificial Sequence
  Description of Artificial Sequence: Synthetic oligonucleotide
tcagttggtattacttga

SEQ ID NO: 3384 - DNA, 18 bp, Artificial Sequence
  Description of Artificial Sequence: Synthetic oligonucleotide
ccacctcagttggtatta

SEQ ID NO: 3385 - DNA, 18 bp, Artificial Sequence
  Description of Artificial Sequence: Synthetic oligonucleotide
tatagccacctcagttgg

SEQ ID NO: 3386 - DNA, 18 bp, Artificial Sequence
  Description of Artificial Sequence: Synthetic oligonucleotide
gactctatagccacctca

SEQ ID NO: 3387 - DNA, 18 bp, Artificial Sequence
  Description of Artificial Sequence: Synthetic oligonucleotide
gtgtggactctatagcca

SEQ ID NO: 3388 - DNA, 18 bp, Artificial Sequence
  Description of Artificial Sequence: Synthetic oligonucleotide
cattggtgtggactctat

SEQ ID NO: 3389 - DNA, 18 bp, Artificial Sequence
  Description of Artificial Sequence: Synthetic oligonucleotide
agtatcattggtgtggac

SEQ ID NO: 3390 - DNA, 18 bp, Artificial Sequence
  Description of Artificial Sequence: Synthetic oligonucleotide
attccagtatcattggtg

SEQ ID NO: 3391 - DNA, 18 bp, Artificial Sequence
  Description of Artificial Sequence: Synthetic oligonucleotide
actagattccagtatcat

SEQ ID NO: 3392 - DNA, 18 bp, Artificial Sequence
  Description of Artificial Sequence: Synthetic oligonucleotide
atgatactagattccagt

SEQ ID NO: 3393 - DNA, 18 bp, Artificial Sequence
  Description of Artificial Sequence: Synthetic oligonucleotide
atgacatgatactagatt

SEQ ID NO: 3394 - DNA, 18 bp, Artificial Sequence
  Description of Artificial Sequence: Synthetic oligonucleotide
atgtgatgacatgatact

SEQ ID NO: 3395 - DNA, 18 bp, Artificial Sequence
  Description of Artificial Sequence: Synthetic oligonucleotide
ataacatgtgatgacatg

SEQ ID NO: 3396 - DNA, 18 bp, Artificial Sequence
  Description of Artificial Sequence: Synthetic oligonucleotide
ctttcataacatgtgatg

SEQ ID NO: 3397 - DNA, 18 bp, Artificial Sequence
  Description of Artificial Sequence: Synthetic oligonucleotide
aattcctttcataacatg

SEQ ID NO: 3398 - DNA, 18 bp, Artificial Sequence
  Description of Artificial Sequence: Synthetic oligonucleotide
agattaattcctttcata

SEQ ID NO: 3399 - DNA, 18 bp, Artificial Sequence
  Description of Artificial Sequence: Synthetic oligonucleotide
aggatagattaattcctt

SEQ ID NO: 3400 - DNA, 18 bp, Artificial Sequence
  Description of Artificial Sequence: Synthetic oligonucleotide
accagaggatagattaat

SEQ ID NO: 3401 - DNA, 18 bp, Artificial Sequence
  Description of Artificial Sequence: Synthetic oligonucleotide
tgatcaccagaggataga

SEQ ID NO: 3402 - DNA, 18 bp, Artificial Sequence
  Description of Artificial Sequence: Synthetic oligonucleotide
gattttgatcaccagagg

SEQ ID NO: 3403 - DNA, 18 bp, Artificial Sequence
  Description of Artificial Sequence: Synthetic oligonucleotide
agcaagattttgatcacc

SEQ ID NO: 3404 - DNA, 18 bp, Artificial Sequence
  Description of Artificial Sequence: Synthetic oligonucleotide
tctggagcaagattttga

SEQ ID NO: 3405 - DNA, 18 bp, Artificial Sequence
  Description of Artificial Sequence: Synthetic oligonucleotide
caatctctggagcaagat

SEQ ID NO: 3406 - DNA, 18 bp, Artificial Sequence
  Description of Artificial Sequence: Synthetic oligonucleotide
catgccaatctctggagc

SEQ ID NO: 3407 - DNA, 18 bp, Artificial Sequence
  Description of Artificial Sequence: Synthetic oligonucleotide
tcctgcatgccaatctct

SEQ ID NO: 3408 - DNA, 18 bp, Artificial Sequence
  Description of Artificial Sequence: Synthetic oligonucleotide
caatctcctgcatgccaa

SEQ ID NO: 3409 - DNA, 18 bp, Artificial Sequence
  Description of Artificial Sequence: Synthetic oligonucleotide
caatgcaatctcctgcat

SEQ ID NO: 3410 - DNA, 18 bp, Artificial Sequence
  Description of Artificial Sequence: Synthetic oligonucleotide
gaatgcaatgcaatctcc

SEQ ID NO: 3411 - DNA, 18 bp, Artificial Sequence
  Description of Artificial Sequence: Synthetic oligonucleotide
cacctgaatgcaatgcaa

SEQ ID NO: 3412 - DNA, 18 bp, Artificial Sequence
  Description of Artificial Sequence: Synthetic oligonucleotide
ttcttcacctgaatgcaa

SEQ ID NO: 3413 - DNA, 18 bp, Artificial Sequence
  Description of Artificial Sequence: Synthetic oligonucleotide
tgtggttcttcacctgaa

SEQ ID NO: 3414 - DNA, 18 bp, Artificial Sequence
  Description of Artificial Sequence: Synthetic oligonucleotide
cagcatgtggttcttcac

SEQ ID NO: 3415 - DNA, 18 bp, Artificial Sequence
  Description of Artificial Sequence: Synthetic oligonucleotide
ttcctcagcatgtggttc

SEQ ID NO: 3416 - DNA, 18 bp, Artificial Sequence
  Description of Artificial Sequence: Synthetic oligonucleotide
aggtgttcctcagcatgt

SEQ ID NO: 3417 - DNA, 18 bp, Artificial Sequence
  Description of Artificial Sequence: Synthetic oligonucleotide
ctttcaggtgttcctcag

SEQ ID NO: 3418 - DNA, 18 bp, Artificial Sequence
  Description of Artificial Sequence: Synthetic oligonucleotide
gtcacctttcaggtgttc

SEQ ID NO: 3419 - DNA, 18 bp, Artificial Sequence
  Description of Artificial Sequence: Synthetic oligonucleotide
taaaagtcacctttcagg

SEQ ID NO: 3420 - DNA, 18 bp, Artificial Sequence
  Description of Artificial Sequence: Synthetic oligonucleotide
tttcgtaaaagtcacctt

SEQ ID NO: 3421 - DNA, 18 bp, Artificial Sequence
  Description of Artificial Sequence: Synthetic oligonucleotide
ttcactttcgtaaaagtc

SEQ ID NO: 3422 - DNA, 18 bp, Artificial Sequence
  Description of Artificial Sequence: Synthetic oligonucleotide
ccatgttcactttcgtaa

SEQ ID NO: 3423 - DNA, 18 bp, Artificial Sequence
  Description of Artificial Sequence: Synthetic oligonucleotide
ttataccatgttcacttt

SEQ ID NO: 3424 - DNA, 18 bp, Artificial Sequence
  Description of Artificial Sequence: Synthetic oligonucleotide
tatatttataccatgttc

SEQ ID NO: 3425 - DNA, 18 bp, Artificial Sequence
  Description of Artificial Sequence: Synthetic oligonucleotide
aggtctatatttatacca

SEQ ID NO: 3426 - DNA, 18 bp, Artificial Sequence
  Description of Artificial Sequence: Synthetic oligonucleotide
tattaaggtctatattta

SEQ ID NO: 3427 - DNA, 18 bp, Artificial Sequence
  Description of Artificial Sequence: Synthetic oligonucleotide
atttatattaaggtctat

SEQ ID NO: 3428 - DNA, 18 bp, Artificial Sequence
  Description of Artificial Sequence: Synthetic oligonucleotide
tgattatttatattaagg

SEQ ID NO: 3429 - DNA, 18 bp, Artificial Sequence
  Description of Artificial Sequence: Synthetic oligonucleotide
ttaaatgattatttatat

SEQ ID NO: 3430 - DNA, 18 bp, Artificial Sequence
  Description of Artificial Sequence: Synthetic oligonucleotide
agcaattaaatgattatt

SEQ ID NO: 3431 - DNA, 18 bp, Artificial Sequence
  Description of Artificial Sequence: Synthetic oligonucleotide
tctttagcaattaaatga

SEQ ID NO: 3432 - DNA, 18 bp, Artificial Sequence
  Description of Artificial Sequence: Synthetic oligonucleotide
ccatctctttagcaatta

SEQ ID NO: 3433 - DNA, 18 bp, Artificial Sequence
  Description of Artificial Sequence: Synthetic oligonucleotide
atgttccatctctttagc

SEQ ID NO: 3434 - DNA, 18 bp, Artificial Sequence
  Description of Artificial Sequence: Synthetic oligonucleotide
gtattatgttccatctct

SEQ ID NO: 3435 - DNA, 18 bp, Artificial Sequence
  Description of Artificial Sequence: Synthetic oligonucleotide
acactgtattatgttcca

SEQ ID NO: 3436 - DNA, 18 bp, Artificial Sequence
  Description of Artificial Sequence: Synthetic oligonucleotide
agcacacactgtattatg

SEQ ID NO: 3437 - DNA, 18 bp, Artificial Sequence
  Description of Artificial Sequence: Synthetic oligonucleotide
ccagcagcacacactgta

SEQ ID NO: 3438 - DNA, 18 bp, Artificial Sequence
  Description of Artificial Sequence: Synthetic oligonucleotide
tagtaccagcagcacaca

SEQ ID NO: 3439 - DNA, 18 bp, Artificial Sequence
  Description of Artificial Sequence: Synthetic oligonucleotide
aggactagtaccagcagc

SEQ ID NO: 3440 - DNA, 18 bp, Artificial Sequence
  Description of Artificial Sequence: Synthetic oligonucleotide
ccaacaggactagtacca

SEQ ID NO: 3441 - DNA, 18 bp, Artificial Sequence
  Description of Artificial Sequence: Synthetic oligonucleotide
tttccccaacaggactag

SEQ ID NO: 3442 - DNA, 18 bp, Artificial Sequence
  Description of Artificial Sequence: Synthetic oligonucleotide
accaatttccccaacagg

SEQ ID NO: 3443 - DNA, 18 bp, Artificial Sequence
  Description of Artificial Sequence: Synthetic oligonucleotide
tcttcaccaatttcccca

SEQ ID NO: 3444 - DNA, 18 bp, Artificial Sequence
  Description of Artificial Sequence: Synthetic oligonucleotide
ttttctcttcaccaattt

SEQ ID NO: 3445 - DNA, 18 bp, Artificial Sequence
  Description of Artificial Sequence: Synthetic oligonucleotide
caaaattttctcttcacc

SEQ ID NO: 3446 - DNA, 18 bp, Artificial Sequence
  Description of Artificial Sequence: Synthetic oligonucleotide
gtgggcaaaattttctct

SEQ ID NO: 3447 - DNA, 18 bp, Artificial Sequence
  Description of Artificial Sequence: Synthetic oligonucleotide
cactggtgggcaaaattt

SEQ ID NO: 3448 - DNA, 18 bp, Artificial Sequence
  Description of Artificial Sequence: Synthetic oligonucleotide
agtctcactggtgggcaa

SEQ ID NO: 3449 - DNA, 18 bp, Artificial Sequence
  Description of Artificial Sequence: Synthetic oligonucleotide
tgtttagtctcactggtg

SEQ ID NO: 3450 - DNA, 18 bp, Artificial Sequence
  Description of Artificial Sequence: Synthetic oligonucleotide
tgcgctgtttagtctcac

SEQ ID NO: 3451 - DNA, 18 bp, Artificial Sequence
  Description of Artificial Sequence: Synthetic oligonucleotide
tactgtgcgctgtttagt

SEQ ID NO: 3452 - DNA, 18 bp, Artificial Sequence
  Description of Artificial Sequence: Synthetic oligonucleotide
tccaatactgtgcgctgt

SEQ ID NO: 3453 - DNA, 18 bp, Artificial Sequence
  Description of Artificial Sequence: Synthetic oligonucleotide
aggtatccaatactgtgc

SEQ ID NO: 3454 - DNA, 18 bp, Artificial Sequence
  Description of Artificial Sequence: Synthetic oligonucleotide
agggtaggtatccaatac

SEQ ID NO: 3455 - DNA, 18 bp, Artificial Sequence
  Description of Artificial Sequence: Synthetic oligonucleotide
acaccagggtaggtatcc

SEQ ID NO: 3456 - DNA, 18 bp, Artificial Sequence
  Description of Artificial Sequence: Synthetic oligonucleotide
cactaacaccagggtagg

SEQ ID NO: 3457 - DNA, 18 bp, Artificial Sequence
  Description of Artificial Sequence: Synthetic oligonucleotide
agcttcactaacaccagg

SEQ ID NO: 3458 - DNA, 18 bp, Artificial Sequence
  Description of Artificial Sequence: Synthetic oligonucleotide
gcatcagcttcactaaca

SEQ ID NO: 3459 - DNA, 18 bp, Artificial Sequence
  Description of Artificial Sequence: Synthetic oligonucleotide
tactgtgtggaaggaagg

SEQ ID NO: 3460 - DNA, 18 bp, Artificial Sequence
  Description of Artificial Sequence: Synthetic oligonucleotide
agtactactgtgtggaag

SEQ ID NO: 3461 - DNA, 18 bp, Artificial Sequence
  Description of Artificial Sequence: Synthetic oligonucleotide
gcgggagtactactgtgt

SEQ ID NO: 3462 - DNA, 18 bp, Artificial Sequence
  Description of Artificial Sequence: Synthetic oligonucleotide
gcaaagcgggagtactac

SEQ ID NO: 3463 - DNA, 18 bp, Artificial Sequence
  Description of Artificial Sequence: Synthetic oligonucleotide
aagatgcaaagcgggagt

SEQ ID NO: 3464 - DNA, 18 bp, Artificial Sequence
  Description of Artificial Sequence: Synthetic oligonucleotide
actgtaagatgcaaagcg

SEQ ID NO: 3465 - DNA, 18 bp, Artificial Sequence
  Description of Artificial Sequence: Synthetic oligonucleotide
tctgaactgtaagatgca

SEQ ID NO: 3466 - DNA, 18 bp, Artificial Sequence
  Description of Artificial Sequence: Synthetic oligonucleotide
tagcctctgaactgtaag

SEQ ID NO: 3467 - DNA, 18 bp, Artificial Sequence
  Description of Artificial Sequence: Synthetic oligonucleotide
aactttagcctctgaact

SEQ ID NO: 3468 - DNA, 18 bp, Artificial Sequence
  Description of Artificial Sequence: Synthetic oligonucleotide
gtggcaactttagcctct

SEQ ID NO: 3469 - DNA, 18 bp, Artificial Sequence
  Description of Artificial Sequence: Synthetic oligonucleotide
tggtggtggcaactttag

SEQ ID NO: 3470 - DNA, 18 bp, Artificial Sequence
  Description of Artificial Sequence: Synthetic oligonucleotide
ccctgtggtggtggcaac

SEQ ID NO: 3471 - DNA, 18 bp, Artificial Sequence
  Description of Artificial Sequence: Synthetic oligonucleotide
aagatccctgtggtggtg

SEQ ID NO: 3472 - DNA, 18 bp, Artificial Sequence
  Description of Artificial Sequence: Synthetic oligonucleotide
ctcagaagatccctgtgg

SEQ ID NO: 3473 - DNA, 18 bp, Artificial Sequence
  Description of Artificial Sequence: Synthetic oligonucleotide
cagctctcagaagatccc

SEQ ID NO: 3474 - DNA, 18 bp, Artificial Sequence
  Description of Artificial Sequence: Synthetic oligonucleotide
ctgtgcagctctcagaag

SEQ ID NO: 3475 - DNA, 18 bp, Artificial Sequence
  Description of Artificial Sequence: Synthetic oligonucleotide
gttaactgtgcagctctc

SEQ ID NO: 3476 - DNA, 18 bp, Artificial Sequence
  Description of Artificial Sequence: Synthetic oligonucleotide
gggatgttaactgtgcag

SEQ ID NO: 3477 - DNA, 18 bp, Artificial Sequence
  Description of Artificial Sequence: Synthetic oligonucleotide
gttgtgggatgttaactg

SEQ ID NO: 3478 - DNA, 18 bp, Artificial Sequence
  Description of Artificial Sequence: Synthetic oligonucleotide
tggttgttgtgggatgtt

SEQ ID NO: 3479 - DNA, 18 bp, Artificial Sequence
  Description of Artificial Sequence: Synthetic oligonucleotide
ccgggtggttgttgtggg

SEQ ID NO: 3480 - DNA, 18 bp, Artificial Sequence
  Description of Artificial Sequence: Synthetic oligonucleotide
ggcttccgggtggttgtt

SEQ ID NO: 3481 - DNA, 18 bp, Artificial Sequence
  Description of Artificial Sequence: Synthetic oligonucleotide
gctcaggcttccgggtgg

SEQ ID NO: 3482 - DNA, 18 bp, Artificial Sequence
  Description of Artificial Sequence: Synthetic oligonucleotide
gcgatgctcaggcttccg

SEQ ID NO: 3483 - DNA, 18 bp, Artificial Sequence
  Description of Artificial Sequence: Synthetic oligonucleotide
gtgatgcgatgctcaggc

SEQ ID NO: 3484 - DNA, 18 bp, Artificial Sequence
  Description of Artificial Sequence: Synthetic oligonucleotide
gtttggtgatgcgatgct

SEQ ID NO: 3485 - DNA, 18 bp, Artificial Sequence
  Description of Artificial Sequence: Synthetic oligonucleotide
gcagtgtttggtgatgcg

SEQ ID NO: 3486 - DNA, 18 bp, Artificial Sequence
  Description of Artificial Sequence: Synthetic oligonucleotide
taaaggcagtgtttggtg

SEQ ID NO: 3487 - DNA, 18 bp, Artificial Sequence
  Description of Artificial Sequence: Synthetic oligonucleotide
aggaataaaggcagtgtt

SEQ ID NO: 3488 - DNA, 18 bp, Artificial Sequence
  Description of Artificial Sequence: Synthetic oligonucleotide
tggataggaataaaggca

SEQ ID NO: 3489 - DNA, 18 bp, Artificial Sequence
  Description of Artificial Sequence: Synthetic oligonucleotide
ggttatggataggaataa

SEQ ID NO: 3490 - DNA, 18 bp, Artificial Sequence
  Description of Artificial Sequence: Synthetic oligonucleotide
acctgggttatggatagg

SEQ ID NO: 3491 - DNA, 18 bp, Artificial Sequence
  Description of Artificial Sequence: Synthetic oligonucleotide
aaactacctgggttatgg

SEQ ID NO: 3492 - DNA, 18 bp, Artificial Sequence
  Description of Artificial Sequence: Synthetic oligonucleotide
ctgggaaactacctgggt

SEQ ID NO: 3493 - DNA, 18 bp, Artificial Sequence
  Description of Artificial Sequence: Synthetic oligonucleotide
agagcctgggaaactacc

SEQ ID NO: 3494 - DNA, 18 bp, Artificial Sequence
  Description of Artificial Sequence: Synthetic oligonucleotide
acaggagagcctgggaaa

SEQ ID NO: 3495 - DNA, 18 bp, Artificial Sequence
  Description of Artificial Sequence: Synthetic oligonucleotide
tagcaacaggagagcctg

SEQ ID NO: 3496 - DNA, 18 bp, Artificial Sequence
  Description of Artificial Sequence: Synthetic oligonucleotide
cgtggtagcaacaggaga

SEQ ID NO: 3497 - DNA, 18 bp, Artificial Sequence
  Description of Artificial Sequence: Synthetic oligonucleotide
gggtccgtggtagcaaca

SEQ ID NO: 3498 - DNA, 18 bp, Artificial Sequence
  Description of Artificial Sequence: Synthetic oligonucleotide
tgatggggtccgtggtag

SEQ ID NO: 3499 - DNA, 18 bp, Artificial Sequence
  Description of Artificial Sequence: Synthetic oligonucleotide
ttttgtgatggggtccgt

SEQ ID NO: 3500 - DNA, 18 bp, Artificial Sequence
  Description of Artificial Sequence: Synthetic oligonucleotide
gcagattttgtgatgggg

SEQ ID NO: 3501 - DNA, 18 bp, Artificial Sequence
  Description of Artificial Sequence: Synthetic oligonucleotide
gggatgcagattttgtga

SEQ ID NO: 3502 - DNA, 18 bp, Artificial Sequence
  Description of Artificial Sequence: Synthetic oligonucleotide
cacttgggatgcagattt

SEQ ID NO: 3503 - DNA, 18 bp, Artificial Sequence
  Description of Artificial Sequence: Synthetic oligonucleotide
cctaccacttgggatgca

SEQ ID NO: 3504 - DNA, 18 bp, Artificial Sequence
  Description of Artificial Sequence: Synthetic oligonucleotide
tgagtcctaccacttggg

SEQ ID NO: 3505 - DNA, 18 bp, Artificial Sequence
  Description of Artificial Sequence: Synthetic oligonucleotide
ttgattgagtcctaccac

SEQ ID NO: 3506 - DNA, 18 bp, Artificial Sequence
  Description of Artificial Sequence: Synthetic oligonucleotide
accatttgattgagtcct

SEQ ID NO: 3507 - DNA, 18 bp, Artificial Sequence
  Description of Artificial Sequence: Synthetic oligonucleotide
gaggcaccatttgattga

SEQ ID NO: 3508 - DNA, 18 bp, Artificial Sequence
  Description of Artificial Sequence: Synthetic oligonucleotide
aatttgaggcaccatttg

SEQ ID NO: 3509 - DNA, 18 bp, Artificial Sequence
  Description of Artificial Sequence: Synthetic oligonucleotide
ccctcaatttgaggcacc

SEQ ID NO: 3510 - DNA, 18 bp, Artificial Sequence
  Description of Artificial Sequence: Synthetic oligonucleotide
tgtttccctcaatttgag

SEQ ID NO: 3511 - DNA, 18 bp, Artificial Sequence
  Description of Artificial Sequence: Synthetic oligonucleotide
ccctgtgtttccctcaat

SEQ ID NO: 3512 - DNA, 18 bp, Artificial Sequence
  Description of Artificial Sequence: Synthetic oligonucleotide
actgtccctgtgtttccc

SEQ ID NO: 3513 - DNA, 18 bp, Artificial Sequence
  Description of Artificial Sequence: Synthetic oligonucleotide
gagggactgtccctgtgt

SEQ ID NO: 3514 - DNA, 18 bp, Artificial Sequence
  Description of Artificial Sequence: Synthetic oligonucleotide
aggctgagggactgtccc

SEQ ID NO: 3515 - DNA, 18 bp, Artificial Sequence
  Description of Artificial Sequence: Synthetic oligonucleotide
ttggtaggctgagggact

SEQ ID NO: 3516 - DNA, 18 bp, Artificial Sequence
  Description of Artificial Sequence: Synthetic oligonucleotide
tcacattggtaggctgag

SEQ ID NO: 3517 - DNA, 18 bp, Artificial Sequence
  Description of Artificial Sequence: Synthetic oligonucleotide
taccttcacattggtagg

SEQ ID NO: 3518 - DNA, 18 bp, Artificial Sequence
  Description of Artificial Sequence: Synthetic oligonucleotide
agaactaccttcacattg

SEQ ID NO: 3519 - DNA, 18 bp, Artificial Sequence
  Description of Artificial Sequence: Synthetic oligonucleotide
ctggaagaactaccttca

SEQ ID NO: 3520 - DNA, 18 bp, Artificial Sequence
  Description of Artificial Sequence: Synthetic oligonucleotide
agctgctggaagaactac

SEQ ID NO: 3521 - DNA, 18 bp, Artificial Sequence
  Description of Artificial Sequence: Synthetic oligonucleotide
aggccagctgctggaaga

SEQ ID NO: 3522 - DNA, 18 bp, Artificial Sequence
  Description of Artificial Sequence: Synthetic oligonucleotide
ctgagaggccagctgctg

SEQ ID NO: 3523 - DNA, 18 bp, Artificial Sequence
  Description of Artificial Sequence: Synthetic oligonucleotide
agcagctgagaggccagc

SEQ ID NO: 3524 - DNA, 18 bp, Artificial Sequence
  Description of Artificial Sequence: Synthetic oligonucleotide
ggctgagcagctgagagg

SEQ ID NO: 3525 - DNA, 18 bp, Artificial Sequence
  Description of Artificial Sequence: Synthetic oligonucleotide
ctggtggctgagcagctg

SEQ ID NO: 3526 - DNA, 18 bp, Artificial Sequence
  Description of Artificial Sequence: Synthetic oligonucleotide
ggaagctggtggctgagc

SEQ ID NO: 3527 - DNA, 18 bp, Artificial Sequence
  Description of Artificial Sequence: Synthetic oligonucleotide
gggtaggaagctggtggc

SEQ ID NO: 3528 - DNA, 18 bp, Artificial Sequence
  Description of Artificial Sequence: Synthetic oligonucleotide
gtaaggggtaggaagctg

SEQ ID NO: 3529 - DNA, 18 bp, Artificial Sequence
  Description of Artificial Sequence: Synthetic oligonucleotide
gcctggtaaggggtagga

SEQ ID NO: 3530 - DNA, 18 bp, Artificial Sequence
  Description of Artificial Sequence: Synthetic oligonucleotide
ggagagcctggtaagggg

SEQ ID NO: 3531 - DNA, 18 bp, Artificial Sequence
  Description of Artificial Sequence: Synthetic oligonucleotide
caaggggagagcctggta

SEQ ID NO: 3532 - DNA, 18 bp, Artificial Sequence
  Description of Artificial Sequence: Synthetic oligonucleotide
ggcagcaaggggagagcc

SEQ ID NO: 3533 - DNA, 18 bp, Artificial Sequence
  Description of Artificial Sequence: Synthetic oligonucleotide
acgccggcagcaagggga

SEQ ID NO: 3534 - DNA, 18 bp, Artificial Sequence
  Description of Artificial Sequence: Synthetic oligonucleotide
gtaacacgccggcagcaa

SEQ ID NO: 3535 - DNA, 18 bp, Artificial Sequence
  Description of Artificial Sequence: Synthetic oligonucleotide
gctgggtaacacgccggc

SEQ ID NO: 3536 - DNA, 18 bp, Artificial Sequence
  Description of Artificial Sequence: Synthetic oligonucleotide
ttctggctgggtaacacg

SEQ ID NO: 3537 - DNA, 18 bp, Artificial Sequence
  Description of Artificial Sequence: Synthetic oligonucleotide
tggagttctggctgggta

SEQ ID NO: 3538 - DNA, 18 bp, Artificial Sequence
  Description of Artificial Sequence: Synthetic oligonucleotide
cacactggagttctggct

SEQ ID NO: 3539 - DNA, 18 bp, Artificial Sequence
  Description of Artificial Sequence: Synthetic oligonucleotide
ctgagcacactggagttc

SEQ ID NO: 3540 - DNA, 18 bp, Artificial Sequence
  Description of Artificial Sequence: Synthetic oligonucleotide
ctgtgctgagcacactgg

SEQ ID NO: 3541 - DNA, 18 bp, Artificial Sequence
  Description of Artificial Sequence: Synthetic oligonucleotide
tgctgctgtgctgagcac

SEQ ID NO: 3542 - DNA, 18 bp, Artificial Sequence
  Description of Artificial Sequence: Synthetic oligonucleotide
gaagttgctgctgtgctg

SEQ ID NO: 3543 - DNA, 18 bp, Artificial Sequence
  Description of Artificial Sequence: Synthetic oligonucleotide
ggggagaagttgctgctg

SEQ ID NO: 3544 - DNA, 18 bp, Artificial Sequence
  Description of Artificial Sequence: Synthetic oligonucleotide
tggctggggagaagttgc

SEQ ID NO: 3545 - DNA, 18 bp, Artificial Sequence
  Description of Artificial Sequence: Synthetic oligonucleotide
ctcgctggctggggagaa

SEQ ID NO: 3546 - DNA, 18 bp, Artificial Sequence
  Description of Artificial Sequence: Synthetic oligonucleotide
ctgcgctcgctggctggg

SEQ ID NO: 3547 - DNA, 18 bp, Artificial Sequence
  Description of Artificial Sequence: Synthetic oligonucleotide
gatacctgcgctcgctgg

SEQ ID NO: 3548 - DNA, 18 bp, Artificial Sequence
  Description of Artificial Sequence: Synthetic oligonucleotide
tggctgatacctgcgctc

SEQ ID NO: 3549 - DNA, 18 bp, Artificial Sequence
  Description of Artificial Sequence: Synthetic oligonucleotide
gggcctggctgatacctg

SEQ ID NO: 3550 - DNA, 18 bp, Artificial Sequence
  Description of Artificial Sequence: Synthetic oligonucleotide
cctgggcctggctgatac

SEQ ID NO: 3551 - DNA, 18 bp, Artificial Sequence
  Description of Artificial Sequence: Synthetic oligonucleotide
agttgcctgggcctggct

SEQ ID NO: 3552 - DNA, 18 bp, Artificial Sequence
  Description of Artificial Sequence: Synthetic oligonucleotide
ggaacagttgcctgggcc

SEQ ID NO: 3553 - DNA, 18 bp, Artificial Sequence
  Description of Artificial Sequence: Synthetic oligonucleotide
caggaggaacagttgcct

SEQ ID NO: 3554 - DNA, 18 bp, Artificial Sequence
  Description of Artificial Sequence: Synthetic oligonucleotide
aactgcaggaggaacagt

SEQ ID NO: 3555 - DNA, 18 bp, Artificial Sequence
  Description of Artificial Sequence: Synthetic oligonucleotide
gtaggaactgcaggagga

SEQ ID NO: 3556 - DNA, 18 bp, Artificial Sequence
  Description of Artificial Sequence: Synthetic oligonucleotide
tgtgggtaggaactgcag

SEQ ID NO: 3557 - DNA, 18 bp, Artificial Sequence
  Description of Artificial Sequence: Synthetic oligonucleotide
tggggtgtgggtaggaac

SEQ ID NO: 3558 - DNA, 18 bp, Artificial Sequence
  Description of Artificial Sequence: Synthetic oligonucleotide
gggcctggggtgtgggta

SEQ ID NO: 3559 - DNA, 18 bp, Artificial Sequence
  Description of Artificial Sequence: Synthetic oligonucleotide
gggcagggcctggggtgt

SEQ ID NO: 3560 - DNA, 18 bp, Artificial Sequence
  Description of Artificial Sequence: Synthetic oligonucleotide
gctcggggcagggcctgg

SEQ ID NO: 3561 - DNA, 18 bp, Artificial Sequence
  Description of Artificial Sequence: Synthetic oligonucleotide
cttgggctcggggcaggg

SEQ ID NO: 3562 - DNA, 18 bp, Artificial Sequence
  Description of Artificial Sequence: Synthetic oligonucleotide
cagggcttgggctcgggg

SEQ ID NO: 3563 - DNA, 18 bp, Artificial Sequence
  Description of Artificial Sequence: Synthetic oligonucleotide
caaggcagggcttgggct

SEQ ID NO: 3564 - DNA, 18 bp, Artificial Sequence
  Description of Artificial Sequence: Synthetic oligonucleotide
tgtgtcaaggcagggctt

SEQ ID NO: 3565 - DNA, 18 bp, Artificial Sequence
  Description of Artificial Sequence: Synthetic oligonucleotide
tactgtgtgtcaaggcag

SEQ ID NO: 3566 - DNA, 18 bp, Artificial Sequence
  Description of Artificial Sequence: Synthetic oligonucleotide
cgcggtactgtgtgtcaa

SEQ ID NO: 3567 - DNA, 18 bp, Artificial Sequence
  Description of Artificial Sequence: Synthetic oligonucleotide
ctctgcgcggtactgtgt

SEQ ID NO: 3568 - DNA, 18 bp, Artificial Sequence
  Description of Artificial Sequence: Synthetic oligonucleotide
tgtcactctgcgcggtac

SEQ ID NO: 3569 - DNA, 18 bp, Artificial Sequence
  Description of Artificial Sequence: Synthetic oligonucleotide
ggtgctgtcactctgcgc

SEQ ID NO: 3570 - DNA, 18 bp, Artificial Sequence
  Description of Artificial Sequence: Synthetic oligonucleotide
taagaggtgctgtcactc

SEQ ID NO: 3571 - DNA, 18 bp, Artificial Sequence
  Description of Artificial Sequence: Synthetic oligonucleotide
tgatgtaagaggtgctgt

SEQ ID NO: 3572 - DNA, 18 bp, Artificial Sequence
  Description of Artificial Sequence: Synthetic oligonucleotide
agcactgatgtaagaggt

SEQ ID NO: 3573 - DNA, 18 bp, Artificial Sequence
  Description of Artificial Sequence: Synthetic oligonucleotide
cccacagcactgatgtaa

SEQ ID NO: 3574 - DNA, 18 bp, Artificial Sequence
  Description of Artificial Sequence: Synthetic oligonucleotide
tgttccccacagcactga

SEQ ID NO: 3575 - DNA, 18 bp, Artificial Sequence
  Description of Artificial Sequence: Synthetic oligonucleotide
gttcgtgttccccacagc

SEQ ID NO: 3576 - DNA, 18 bp, Artificial Sequence
  Description of Artificial Sequence: Synthetic oligonucleotide
ttagcgttcgtgttcccc

SEQ ID NO: 3577 - DNA, 18 bp, Artificial Sequence
  Description of Artificial Sequence: Synthetic oligonucleotide
tcccattagcgttcgtgt

SEQ ID NO: 3578 - DNA, 18 bp, Artificial Sequence
  Description of Artificial Sequence: Synthetic oligonucleotide
tactgtcccattagcgtt

SEQ ID NO: 3579 - DNA, 18 bp, Artificial Sequence
  Description of Artificial Sequence: Synthetic oligonucleotide
ggcactactgtcccatta

SEQ ID NO: 3580 - DNA, 18 bp, Artificial Sequence
  Description of Artificial Sequence: Synthetic oligonucleotide
gcggtggcactactgtcc

SEQ ID NO: 3581 - DNA, 18 bp, Artificial Sequence
  Description of Artificial Sequence: Synthetic oligonucleotide
ctgctgcggtggcactac

SEQ ID NO: 3582 - DNA, 18 bp, Artificial Sequence
  Description of Artificial Sequence: Synthetic oligonucleotide
cccatctgctgcggtggc

SEQ ID NO: 3583 - DNA, 18 bp, Artificial Sequence
  Description of Artificial Sequence: Synthetic oligonucleotide
ctgagcccatctgctgcg

SEQ ID NO: 3584 - DNA, 18 bp, Artificial Sequence
  Description of Artificial Sequence: Synthetic oligonucleotide
aggacctgagcccatctg

SEQ ID NO: 3585 - DNA, 18 bp, Artificial Sequence
  Description of Artificial Sequence: Synthetic oligonucleotide
ccacaaggacctgagccc

SEQ ID NO: 3586 - DNA, 18 bp, Artificial Sequence
  Description of Artificial Sequence: Synthetic oligonucleotide
aagaaccacaaggacctg

SEQ ID NO: 3587 - DNA, 18 bp, Artificial Sequence
  Description of Artificial Sequence: Synthetic oligonucleotide
cccacaagaaccacaagg

SEQ ID NO: 3588 - DNA, 18 bp, Artificial Sequence
  Description of Artificial Sequence: Synthetic oligonucleotide
caccttcgcccacaagaa

SEQ ID NO: 3589 - DNA, 18 bp, Artificial Sequence
  Description of Artificial Sequence: Synthetic oligonucleotide
agctgcaccttcgcccac

SEQ ID NO: 3590 - DNA, 18 bp, Artificial Sequence
  Description of Artificial Sequence: Synthetic oligonucleotide
cccacagctgcaccttcg

SEQ ID NO: 3591 - DNA, 18 bp, Artificial Sequence
  Description of Artificial Sequence: Synthetic oligonucleotide
ttggtcccacagctgcac

SEQ ID NO: 3592 - DNA, 18 bp, Artificial Sequence
  Description of Artificial Sequence: Synthetic oligonucleotide
ttccattggtcccacagc

SEQ ID NO: 3593 - DNA, 18 bp, Artificial Sequence
  Description of Artificial Sequence: Synthetic oligonucleotide
aaggtttccattggtccc

SEQ ID NO: 3594 - DNA, 18 bp, Artificial Sequence
  Description of Artificial Sequence: Synthetic oligonucleotide
agctgaaggtttccattg

SEQ ID NO: 3595 - DNA, 18 bp, Artificial Sequence
  Description of Artificial Sequence: Synthetic oligonucleotide
tatttagctgaaggtttc

SEQ ID NO: 3596 - DNA, 18 bp, Artificial Sequence
  Description of Artificial Sequence: Synthetic oligonucleotide
gtaactatttagctgaag

SEQ ID NO: 3597 - DNA, 18 bp, Artificial Sequence
  Description of Artificial Sequence: Synthetic oligonucleotide
taatagtaactatttagc

SEQ ID NO: 3598 - DNA, 18 bp, Artificial Sequence
  Description of Artificial Sequence: Synthetic oligonucleotide
taggataatagtaactat

SEQ ID NO: 3599 - DNA, 18 bp, Artificial Sequence
  Description of Artificial Sequence: Synthetic oligonucleotide
tggattaggataatagta

SEQ ID NO: 3600 - DNA, 18 bp, Artificial Sequence
  Description of Artificial Sequence: Synthetic oligonucleotide
ggcattggattaggataa

SEQ ID NO: 3601 - DNA, 18 bp, Artificial Sequence
  Description of Artificial Sequence: Synthetic oligonucleotide
gtccaggcattggattag

SEQ ID NO: 3602 - DNA, 18 bp, Artificial Sequence
  Description of Artificial Sequence: Synthetic oligonucleotide
cattggtccaggcattgg

SEQ ID NO: 3603 - DNA, 18 bp, Artificial Sequence
  Description of Artificial Sequence: Synthetic oligonucleotide
cggtacattggtccaggc

SEQ ID NO: 3604 - DNA, 18 bp, Artificial Sequence
  Description of Artificial Sequence: Synthetic oligonucleotide
ggactcggtacattggtc

SEQ ID NO: 3605 - DNA, 18 bp, Artificial Sequence
  Description of Artificial Sequence: Synthetic oligonucleotide
tgaagggactcggtacat

SEQ ID NO: 3606 - DNA, 18 bp, Artificial Sequence
  Description of Artificial Sequence: Synthetic oligonucleotide
aagaatgaagggactcgg

SEQ ID NO: 3607 - DNA, 18 bp, Artificial Sequence
  Description of Artificial Sequence: Synthetic oligonucleotide
gagtaaagaatgaaggga

SEQ ID NO: 3608 - DNA, 18 bp, Artificial Sequence
  Description of Artificial Sequence: Synthetic oligonucleotide
tggcagagtaaagaatga

SEQ ID NO: 3609 - DNA, 18 bp, Artificial Sequence
  Description of Artificial Sequence: Synthetic oligonucleotide
atggatggcagagtaaag

SEQ ID NO: 3610 - DNA, 18 bp, Artificial Sequence
  Description of Artificial Sequence: Synthetic oligonucleotide
tgcaaatggatggcagag

SEQ ID NO: 3611 - DNA, 18 bp, Artificial Sequence
  Description of Artificial Sequence: Synthetic oligonucleotide
gccattgcaaatggatgg

SEQ ID NO: 3612 - DNA, 18 bp, Artificial Sequence
  Description of Artificial Sequence: Synthetic oligonucleotide
tagctgccattgcaaatg

SEQ ID NO: 3613 - DNA, 18 bp, Artificial Sequence
  Description of Artificial Sequence: Synthetic oligonucleotide
tgaggtagctgccattgc

SEQ ID NO: 3614 - DNA, 18 bp, Artificial Sequence
  Description of Artificial Sequence: Synthetic oligonucleotide
ttggttgaggtagctgcc

SEQ ID NO: 3615 - DNA, 18 bp, Artificial Sequence
  Description of Artificial Sequence: Synthetic oligonucleotide
tgtgcttggttgaggtag

SEQ ID NO: 3616 - DNA, 18 bp, Artificial Sequence
  Description of Artificial Sequence: Synthetic oligonucleotide
tctgatgtgcttggttga

SEQ ID NO: 3617 - DNA, 18 bp, Artificial Sequence
  Description of Artificial Sequence: Synthetic oligonucleotide
attgctctgatgtgcttg

SEQ ID NO: 3618 - DNA, 18 bp, Artificial Sequence
  Description of Artificial Sequence: Synthetic oligonucleotide
tttccattgctctgatgt

SEQ ID NO: 3619 - DNA, 18 bp, Artificial Sequence
  Description of Artificial Sequence: Synthetic oligonucleotide
gttggtttccattgctct

SEQ ID NO: 3620 - DNA, 18 bp, Artificial Sequence
  Description of Artificial Sequence: Synthetic oligonucleotide
aggaagttggtttccatt

SEQ ID NO: 3621 - DNA, 18 bp, Artificial Sequence
  Description of Artificial Sequence: Synthetic oligonucleotide
aaaaaaggaagttggttt

SEQ ID NO: 3622 - DNA, 18 bp, Artificial Sequence
  Description of Artificial Sequence: Synthetic oligonucleotide
gcagaaaaaaaggaagtt

SEQ ID NO: 3623 - DNA, 18 bp, Artificial Sequence
  Description of Artificial Sequence: Synthetic oligonucleotide
ctgaggcagaaaaaaagg

SEQ ID NO: 3624 - DNA, 18 bp, Artificial Sequence
  Description of Artificial Sequence: Synthetic oligonucleotide
agtctgaggcagaaaaaa

SEQ ID NO: 3625 - DNA, 18 bp, Artificial Sequence
  Description of Artificial Sequence: Synthetic oligonucleotide
tatggagtctgaggcaga

SEQ ID NO: 3626 - DNA, 18 bp, Artificial Sequence
  Description of Artificial Sequence: Synthetic oligonucleotide
ttgcatatggagtctgag

SEQ ID NO: 3627 - DNA, 18 bp, Artificial Sequence
  Description of Artificial Sequence: Synthetic oligonucleotide
tccatttgcatatggagt

SEQ ID NO: 3628 - DNA, 18 bp, Artificial Sequence
  Description of Artificial Sequence: Synthetic oligonucleotide
accagtccatttgcatat

SEQ ID NO: 3629 - DNA, 18 bp, Artificial Sequence
  Description of Artificial Sequence: Synthetic oligonucleotide
catgtaccagtccatttg

SEQ ID NO: 3630 - DNA, 18 bp, Artificial Sequence
  Description of Artificial Sequence: Synthetic oligonucleotide
tgggtcatgtaccagtcc

SEQ ID NO: 3631 - DNA, 18 bp, Artificial Sequence
  Description of Artificial Sequence: Synthetic oligonucleotide
atgactgggtcatgtacc

SEQ ID NO: 3632 - DNA, 18 bp, Artificial Sequence
  Description of Artificial Sequence: Synthetic oligonucleotide
tccccatgactgggtcat

SEQ ID NO: 3633 - DNA, 18 bp, Artificial Sequence
  Description of Artificial Sequence: Synthetic oligonucleotide
ttggctccccatgactgg

SEQ ID NO: 3634 - DNA, 18 bp, Artificial Sequence
  Description of Artificial Sequence: Synthetic oligonucleotide
ttggcttggctccccatg

SEQ ID NO: 3635 - DNA, 18 bp, Artificial Sequence
  Description of Artificial Sequence: Synthetic oligonucleotide
catagttggcttggctcc

SEQ ID NO: 3636 - DNA, 18 bp, Artificial Sequence
  Description of Artificial Sequence: Synthetic oligonucleotide
catgccatagttggcttg

SEQ ID NO: 3637 - DNA, 18 bp, Artificial Sequence
  Description of Artificial Sequence: Synthetic oligonucleotide
tgctgcatgccatagttg

SEQ ID NO: 3638 - DNA, 18 bp, Artificial Sequence
  Description of Artificial Sequence: Synthetic oligonucleotide
ccatctgctgcatgccat

SEQ ID NO: 3639 - DNA, 18 bp, Artificial Sequence
  Description of Artificial Sequence: Synthetic oligonucleotide
tcctgccatctgctgcat

SEQ ID NO: 3640 - DNA, 18 bp, Artificial Sequence
  Description of Artificial Sequence: Synthetic oligonucleotide
ccaaatcctgccatctgc

SEQ ID NO: 3641 - DNA, 18 bp, Artificial Sequence
  Description of Artificial Sequence: Synthetic oligonucleotide
atctcccaaatcctgcca

SEQ ID NO: 3642 - DNA, 18 bp, Artificial Sequence
  Description of Artificial Sequence: Synthetic oligonucleotide
atagaatctcccaaatcc

SEQ ID NO: 3643 - DNA, 18 bp, Artificial Sequence
  Description of Artificial Sequence: Synthetic oligonucleotide
acaggatagaatctccca

SEQ ID NO: 3644 - DNA, 18 bp, Artificial Sequence
  Description of Artificial Sequence: Synthetic oligonucleotide
gatatacaggatagaatc

SEQ ID NO: 3645 - DNA, 18 bp, Artificial Sequence
  Description of Artificial Sequence: Synthetic oligonucleotide
tgctggatatacaggata

SEQ ID NO: 3646 - DNA, 18 bp, Artificial Sequence
  Description of Artificial Sequence: Synthetic oligonucleotide
ttaggtgctggatataca

SEQ ID NO: 3647 - DNA, 18 bp, Artificial Sequence
  Description of Artificial Sequence: Synthetic oligonucleotide
ctacgttaggtgctggat

SEQ ID NO: 3648 - DNA, 18 bp, Artificial Sequence
  Description of Artificial Sequence: Synthetic oligonucleotide
ggcaactacgttaggtgc

SEQ ID NO: 3649 - DNA, 18 bp, Artificial Sequence
  Description of Artificial Sequence: Synthetic oligonucleotide
gtgttggcaactacgtta

SEQ ID NO: 3650 - DNA, 18 bp, Artificial Sequence
  Description of Artificial Sequence: Synthetic oligonucleotide
cactggtgttggcaacta

SEQ ID NO: 3651 - DNA, 18 bp, Artificial Sequence
  Description of Artificial Sequence: Synthetic oligonucleotide
cgaaccactggtgttggc
